United States Patent Application Publication US 2005/0147987 A1 - sequence listing, part 2

SEQ ID NO: 168 - DNA, 41353 bp, Human
caattataaatgactccaataattatttaatgtttccctcctgtattagaatataatctctctgaagatagggacagcatcaccaattgtatccccaggacctagaatggtgtctggcacatggtaggttttcgatagatacttgctgaatcaatgtaatctggaggctgacaaattcatgataaagaccccagttctgtctgaatagcttctctatctcttcctttctcctctctccaccctaaacttgatatagcagtgcctaaaactcacttccagtatcttttttaaaatttgccttcttctagagtataaaagcccagtatttaaccttgcccatggttgcctggaatagagggtgcttttcccaccctcctttgcagctagcagtgcctatgtgactaagttctgagcaagaggtgtggaattgatggctgccactttcaagatgtgtctttatgggtggaggtgcacccatctccttcccattcctccttcctgctggttggaatttggatatcgtggctggagcagccaccttggatcatgaggtggaaatcttggaccaaaggatggtggaagctagaagacccaggcaccctgatgatcagggagcagccactccaaccttgggctgaacctctggccttgctttacatgagagagcccttggttatgccattgttgtttggggtgggattttctgtcactcccaggtgaacaacctaatcctaagtgatacctagaaggtccctgctagactgacctcttgggaggggagggaataaacgagtctcaggtggtggaaccagagcttgctggagaggagagtctctcctggtgaatggaagccaggggcccctcccactggctgtctccttccctgggctcaggcaggtccagccttcctcaggactttgagaagttcagttctctccccaggagtagctactttcacaaacttcctgtccctttagtcgacatgccccacggcaggtccgaggctgggctctgccacaactcatctttcctaagagtggcatcaaggttctttggtgggggatcctcttttcccatccccacttctcaagagcattagggaagatacagtcagtgccctcttagcattctctttccacttgttgggtgtaagaagggaacctgagggccctgcagtgtttaggggtgggagtggaaacagacaggaaagatccagagtccccaagaagcgaagcagggagagagataaagaaggcaggaacaaccatggacacacattatcacacatacacaggttacaagagcaggaggctggagctgcaagaggtggcagggaagcttccagaaaggcagaccccagcctcatccctccctgccctgcaatgctgaagtttccaggtagaggggaacctctagacccttgcgactgtcagagttctgtggatccatttgtcagtctccccacccccaaccttgactatcctgggcctgccttcaggacagaacatgggaatgagaagaggacctgggaaggggtaatcctgggaaaaaaaagttcttattagtcacccctggctctgaggatactttccaggagtggcctgccaagccgtgtgaccttggacaagtcccgtccattcctcaggcctcagtttcctttgagggaccctgaatgggcgggggttgctgtagctttcctcagctgggagacccgggaggaggtccggggtgccagggtgggaggagggcctggcttgtcgctgaaagccggccaggcgcactgtcggcgctcagagctggtggccgcctcctgcgcttcctgattcccagccgcgctcgctcggagagcagtgcccgctatctcctggcccgggaccggcagaggggtgcggcggggcgggcccaggggtctctggcggccggaagaaccgggaccctgccaggcccctcccgcgggcagggcggcccctcgccggctcctcccccaccgcccgccaccagcccgggatcagtctccgcacgcggttccgcaggtggcagcgatggcccagtcctgaactccccgccatggccggcgcccccggcccgctgcgccttgcgctgctgctgctcgggatggtgggcagggccggcccccgcccccaggtgagatccagggaccccgacgacaccgggggaggcgggtggctctgcgggctgcaggcgcagtgtcctggtggagggccccgggacttgaacgaaactccgagaccgctggcgggggcatccgaaagcctcggggggagtagggactggagacttggtgcccctgggctggaaggcccaggtgagggcttggactacagaggattccccccaaccccagcgaggcgccctcttcctcgccacccgggtccctctgcccgggcacccgctgccccgcggccgccctgcgctgacttctgctccgcttctcctttgtccccagcactttcccaactccttctaaaccgtgtcagcggccctggcacagcccggcatcctcccggactccctctgccccacagtctgacccagacccctctcccgcagtgcctccccagacaatccacctgctcaaagaccctgagaagaccctgggaggagctgagagggccagggtgcggagacccggctcctctccctttctcatcagcccccagcacagcctttgattcatggctcctggggccctgcggtggcagcttgtccttcccagtgacctcccagatggaacctaccccccgtcccctaccagcctctgtagcaaacaggcagaaggctcagtgcccccctggaagcagccaggcgcccccactcacccactctgctgacctcccattctcatcctgcactgacagcaggccccaagagaaggcatactgggacacgcaagaacacctgggctccttggtgccaccagagagcaggccacaggtggaccaccgcagcccctctctcttgcccttgttgcttttcctgccctgggatcctgggctagggacagtggtcagctgcttttgaagaggggagctgtccaaagatgctgggacttgcttgagcagagaggagacatagacttgggtggcctgtcctgggtcaggaaacaggttcttcctatcacctcccactgctacccccagacctaaagaactgagatctgtggggagtggacctgaacgaaccttgaagtttgtcccagaaccattgccttggtgagggcagactccacctcggcggaaaccccagatgtggacagacatacctctcagctaagatgccagcacatttttcagcccccagattattttccagacgcatcctctccctgcccctgttccccagcccagctgctgtcctgagccccaggagacaacctcccccttccaagacaccttccccacagcgcccccagccaggccttggttttcctggtgcggctgggatctttcaggggccagggctgcagacccaagatgtggttcttgcccatcgttccctcctcttacggactgggttgggataggggtggaggctctgcttcctggttccatcctcctccaggccaggtttacaggtctggtttgaatgaagggaagaaagcaaagggaagaggaaagtttctgtgagctgtcttcccagaggccttattcccagaagtgtcaggctcctgaacccacactttcctctgatccgattttactccttagccccaggcctaaggcaaaagctgggcatcctgggggcataacaggattggggtggtagagaaggataggaggggacaggtcctagcagggaggggagctttgagggggtgctcttgtcatgggaaactgagctgccacagagatctgagtcacaggaggtgttaaggatagattgcaacaattatgacacaacatcatgcgtgcttataagactacaaaatagtgtattttgcattttgttttctgtctatgaagtcaaaagggttagagttactcccctcatgttgctgatgggggaatgaaagctcagaaaaagagggtcccctgtataaagtagcccagcagttcaggagcagggaagagaaaggggtgaagggctgggctcttgacctaacacctcctactcagacgggactgaagggagacctctgagagtgagctgctcactgtcaggtctcgtgaggctggaaacagcatccctgcaggtagggggatggctgagttgacttctgaagaaggtgccctaggctactctttcattgctgctgggaaggctcattcccctaccctggtccttacctctccaataccctggtgagggagcgggcctactgaggagacaggcaagcctttgacactcaaagttaaaatcagacacaactggattcaaatatagggtctgctattagctggtgatctggagttggacacttggttatccccaatacatgtccttatctgtaaataaggatcataagctctatcacatagggttatggaggggattgagacactggcccctgaaatggcaactttagtcactttagtcaaatggcagaactgacccatttgtccttggggatccagaagtgttttccagggctgcaggatagtatgagagaggggctgttggagaccctgggtctctgtactctagtgaatggcaggtggagtccagggctgagccttgatcagtgcggacattgttctaagctgggtttcctcctggacaggacccaggctgggggctggggcaggagcaaccaagaaaccacatcctgccctcgaatgccttgcaccaaggcaaaacaggcttcctcagctgcagcctgcccctaggaaaattcctatgtgtgtgtggtggtggtggtggttggaggaggggacagagatacagacaggtagtctgagacagaccagggggagaagggagtaggctatatgagcccccagttcccaggtatgtgtgagtgaccctgtgtgtaacagtctgtgtgggaatgagtccctgtgtgtgcaacatctcagcatgcaactgtacatctgacagtgtctatgtttttgtgaccctgcatatgatactgtgtctgtgggagggtctgtgtgtgtgtgtgggggggcgggcatcttggtgtgtgaatgggtgtcaactagtgtgtgtctatatgtgcaggagagatagtgtgcatgtgagagtgtctgtgtgttcctctgtgtgtgtgtgttggggacagtgtctcagcatgcgactgtgtacctggcagtctgtgagtgattgtgtgtggtgggagagagtctgtgtcagtgtctcagtattgggaatgtgcttgggggcgtgtgtgatgatgcgtgtgacagtgtgtccacgtgggggtttttgtgactgtaagaacatgtgtgtagtattccttttcctgtcctttcgttcagatatctaaagcccttagggaaaaaaaatggattgtaagctctgagcttttgaaaaaaaagaaagaaagaaagaaaaacaaggggcggtcaaagagacaggggtctgttgatggaaggggtgatttgacttctgggaggtgacacagaggaaggaggttggggtcctgggaggagatgccagggaacctgaagggctggacttagttgggggactccagaaatttgagttggaatccctccttcctccttctgagaggccttcctgcatgtctcccacctctgtgccacctccttcccgtcaccaaaatggtccccagagaaagaaagaatctgatacacttattcgcactgagaaataggagtgcctttcagattggcagccagtgtttggagagggagccccttcctggggtgttggaaagcccaccaccccgggggcttccactccacctgcttccttctctgctgtccttccttccaacgctgcctgcttgtacagggcttgagaagtcacaaagattttcacctgctttatcttgttggatctgtgcagtttgagaagaatgatatgcccattttatggacggcagaactggcaactgatgaggaaactgaggtcctaaaagataaatcgtgtcccacagtcctgcattaacagagctgggatttagaccaagaacttataaatcgctgtccagtgctccttcctgtagaccacaccactccctcctggtgtcctctttcctgtctcctgcttcctccaaaaactcctgaatctgagggatgccccttccttcttgtaacctccaacccaggtgtcgtctccacgtgccttcatccacctcagagagatcccatgaagcctgtcaagtcttgattctagaaactgccatcctgcccttcccatggccctttagaccccctctgaccgctgctttgctctcctggtcagctctgctgccttgtgagggacagggacatctggattgcatccttcccgctacccagaacccacagccccaccttgtcaggcttgcagcagggacttatgttgtgggaggatgaaatggaggagtgggggacactggtgggcagggccttgcccctcctcacagggcatggggtccaaagcttcctccctgcttcactttgccattggctgtggttactgctggaagatctcacaaattaagcagaatgattggtcattggacatgaacatatattcatttcctctttctgggaatatgttgatcctagaagtgaggaaggggtggggccccagtccccaggaagcctggtcactccctcccactctgccctttccactaaacagtagaaatcatggggattgctgccattgactgagccttctccatgtgcccaccatcctaagcattaactcagtccccacagccatcccatgggggaggggctgctgttcccttttgcacaagtgtaagctgagcctaaaacatacaactcttgcactcggttgcaaacctaatatctgggtgacccaggtccaggcccagatctgagcccaaggccagggttgttcagcctccactatgttacctgggcacccaggccctatggcactgggtggccctagcctcatttactcagtctttccccagaccagaacctcccatctgtcccagggcccaccaccactctctccctgccccaaaaaatcctcctgataacagtccacagctctcttctgctctccggagcactgatgtccccacctttgtaccttttccctgctgtgccctcctgctgaagtgcccgccctcctccttgctagcccagtctgcctccaacccccttcaccccagccccacctcacagtccccaatccctcaggcctcttgagtctgcactgaaccctgccccaaccactccctgaacactttcacccactgccttccctgttatgtcacttgtcctgtaaagcattgacccccgagtagcctgaagactctctcaggcagggctcctgcagtcacctttatactccctgcattcccctccacccacgaccacccagaacctggcacagttatggtttctgtaaatacgaggcgtgggagaggccagaagtctgggtagtttgcactgtgtgtgcctgcaggggtgggatgaaggctcgaaggtatttagaagccctgatctggtgtagggaggggacaagatactcttactgtcaggaatccctcacctaagggggagccacagccccatcctcaggaagctccagtctgaggggagacacagccccgtcctcagggagccccagtctgaatatagttttatgtccacagctctgctcagagtaggtgacagcgctgccctggggtgcaggaggccagattggccttcatggcgctgtcgttaacccctccccccgcctctgggaagaactggcttccatacctctctgcctgccccagacacaccttctgccccagttcccagcagtgaccttgtgtgtggtctgctttcattctagaaacagaaaccaagggggatttctccgtctctctgccctccacccccagcagctgctgcatttaggggcagcatggaagagccctttacccggagaagagggaagaagtgagaagggaaacggggcggtgggggttgatccaccaggacttgctctgatgaaaactgtgccacctcctcagctgtggctaatgtcatggacaacacctttgcagctgttatgtttgatttcttgttctttttttccccaagcaaatacagttgacctttgccctcagaagagctctgtccttcagggtagcccctgccgccttggcacacttatgccaaggatgctgctggggcttaaagtgagctgggcccttccatggggcctccgaggcagcaaggggtgagcaaggcaacccaagtctctcagggaggtgtgtgataagccagctagaacccgagactggatccagcatgtgcccagcacgctacaaggcaagggggcaagcttctaaaaagaagctattttaatttcagcacacgtggacatttttgtgatttcaaaaagcaaaatgttgttttaaattatgtatgggtcctacattttatacatggggctcttgggtcatttcagcatctgcagcctctgaaggacgaatatttataatttttaaggctgttcaggaaaaaactaaaaagaacgacaaccccaagacatagctgaaggaagtgcacaaaaacactcagaaggaatggtggattctcagtgggatgggtctgtttgggtctgtgtgctgaaaagccatttcggtgacctcactggaagtggaggctcagctctccctactcacaggtgagagggatccttcccattgcacgtgtgacttcagtgttctggaacctccctgaccccttcacctcatgtcctcaggactcttcctttgggtggatagaagctgggttgaatattagatttggttgctgtgtcagaggggagcacggggagggggtggggggggctgtgttgagtgcatctgtaagtgagtgcgttttggaggaggaatgctaatggcagacatcccagctctttgtagccctgaacgccactactctccccggcccccgcacaccttgcgatattctaccatggtcactgatctgaaggactccagattctagccttaactctgcttcctgggggggctgtgcacccttgattcagttcctctcccactctggcctgtgtgtcttcttctagaatggttgaaagtgcaagaagccctcaggcaggctgactaggcgccagaaggagcttagagtcctgggccctcagaaagtctctctcctaagtgagatcagagatcacaaatgagacacacacgctcctttcctccttcacccacccacctccccaaaagcatcaatttagcagacatttgctgggtgctcgtgacacatcaagctatgcaccctgggaggaatgaagatgtcaaaccatccacctggggcccctgggtggcagtgacttattctcactctctttcagaggtggctgatgcctggcagaatttggggctttgaggtttcatggagattgagaaaccaagtgtgttagggggtgagggggcaggagaggggctggctgaacccacaggcctcccatatatgccctccccccagggtgccactgtgtccctctgggagacggtgcagaaatggcgagaataccgacgccagtgccagcgctccctgactgaggatccacctcctgccacaggtgagtccatgtaggctccccacctttagtgctccccacccaaccaacttctggaggactttgatgaactcaatgtccatggctgggagccatttgcctctataggatgccacccctgccctctgccttcatctcattgtccaagctactccttcacctggataccttcctttctgccgaccaaaatcttccttttcttcaaagtccgcggaagcactgcctcctccagaaaatcttccccaggacttctgccatcatttggcccttactcgtttgctgtagtctgctttggggttgctgtcttatttctgtcttagctgtcttatctgtgtgtccttccctgcaccgccggccagccccccagctagagcctctcagagcaggcacccggcctttccatttttgtcctcagcacctcccagcctgtgcatggactgagggctccacaaacatatttataggaataaatgtttcagggagttcacaaggtggtttaaagagcacgggattggagcccgctgggcctaggttgaaatcctgactgtaattataacacgtgacctaaagaaggttatcttaagtgagatcagaaggaaggtaagctaacatttccctctaatctgtgaagtgcaatttaagaataggcccatagggatttttcattgagcacgtactatgttccattatctgtgtagcatatagtcttgatcccacaaaaccctatggggctggaaatactcctgttttacagatcaggaaacagacattaagttacttgctcaaggtcctgccactgataagtggcaagtgcccctgcttggctcttgctgggtggggaaagtgcttggcatacagtaagcattcagcagaggttagtggcatgcagcctccgaggaggggaggggtcttggggaagggagggaaagggccatggccagtcacaagcagggactcagagactgttctttctgctcccagacttgttctgcaaccggaccttcgatgaatacgcctgctggccagatggggagccaggctcgttcgtgaatgtcagctgcccctggtacctgccctgggccagcagtggtgagccccctccccgacctggtacctgccctgggccagcagtggtgaaccccctccccgacctggtatctgccctgggccagcagtggtgagccccctccccgacctgatacctgccctgggccagcagtggtgagccccctccctgacctggtacctgccctgggccagcagtggtgagccccctccctaacctggtacctgccgtgggtcagcagtggtgagccccctccctaacctggtacctgccgtgggtcagcagtggtgagccccctccctgacctggtacctgccctgggtcagcagtggtgagctccctcccccaccgtcccctgtatcgaggaggctgaggtcaaggcgctgcttcctttcctctgagacacagccctccccacccagaatgtctttaggcctcctagtgagtggtccacctgcctttcctggggtgaggggagcagtcagtagtgataagtttcatgatggcctgaggtaccacctgggtctgggcgtgaggccagtgctggccagtgtgtggggaagggaaagtaagtgtctgaagagaaatgcgaccccttccaattcagtagtcaggaaaagagctgggtggggacagactcttgcggggagggaagctacccagggtgtctgctgtgtgtatacatgtatgtatgatatgtgtatgcaggtggcccatacctggcagtgacatttagctacttcctcactctttagaggttcactgggagaagtgatcagggcattggtggggtgacgaaccccaccagactcagccctcctcagctcactcctgcctgcaagggggaccttgtactggggaagatgtgactgggtaggtgggaaggtcatttcattgggggtacagagatttgcagaggctgcaagaggatccctgactggagggttagttaatgtgccccgctatctatcccagcctcccttgctgagcccagtttcacccaggcaccgtggaggataacaggagacaagcaccctcatggcaaggagctcccagtctccataaggggagaaaagatatttccctatcatcatcatcatcatcatcatcatcaccatcaccatcatcatcgtcatcatagccagcatttattgagtacctactgtgtgccaagtcctgccctaaaagcagggctttataactaccctgtggttatacctgctgtacagatgaggaaactgaagcacaaaaagtttaagtcacttgttccaaatgatgtggtcaatggcagagccaggatttgaatccaattcgtgctcctatcatcacaccttgaaggggccggagcccaagcagcaactggcccagaagcaagtgcgggcatgaggttatgctctggggaagccaggtgtcttcctggaggaggtggcctggtggggcccaatgtaagcttcaccttggcacgtgggactgaagtcagatgaggcccaggctggtctcctaaaagtactgtctccttgtccacactcacagtacactcacctctccccaaggagcagggagagcctgggcctagaaggaggcaggagcctgggcccatcagtggcctgccttctccaatactgcctgttggaagcactttccgtgctacactcttttcatcctcacaaccctctgaggcaagtactctgattaccctcccattttcagatggggaaactaaggcacagaggtgctcagtgacttttgcaagctcacacagccattagtgggcgacccagaagcttggtttagagtcagtgtggctaattgctacaccaaagtcttccttgggggtgtgtgtgtgtgcccttgcatgtggctctggcctggagacaggtgagtgatctggatgccctctgctgtctgggcacacctctagggacagggatgagctgtctgccctctcctatgaactctgcaatctggtggttctgctgactagccgtgtaagcaggagcaagttgccagacctctctgtgccttggttgactcatctgggagatggtatagagccaagtgacatgggtgtcgggaggaccacagggccttgagaaatggtagctgttaatttttcccacctccctacatacctccctgacttcctgcaatacacacactttctctgcctcccatagatttgagactggcagcttggccagcgtctgctgggcctctagaccccagggagccaggcgtaggacagggcccatcactcagcactaagccacccccagctctgcctgccgcttgcagctccatccatcacctttaattttatttgagcaggaaataggtcctggtggtgcccgtttatgagcaaacatggttttattgctttctccatgaagataacggccactgcacaggccccctgccagcctttccccaaccccgtccccctgccactcaccaggctaatttactcccttttttgacacttggaatcaccgactctgctgccctctcctcactccctgagttacggatgctcagagacaactaccacaggctcaagctgcgtaattgctgcctctggcctgtcctggagctttccttggcaaaggttggcagcggaggcttccctgacccccacccaggtgtgtgggagcagttctgaagaaggggacagttctggagctttcttgggctgatcaagcgagtagcctgtggagaaacgtcacagtgtgccctggtgtcaaggagaaggaagggagttatctcaggcagggtcctggcagaaaacatgctcagttggcaatttggagagaatttaatgttggggaggggtcattttcagaggctggcaaggtaaagggaccaatgaggcatataaagcaccagggactacaacaatggaaagcttgagcacccctagacctgagaaggaagggacaagaatggggctggggggtccccatgacagctgggctacaatggagaagccacccagcagggctgtggccacagaggggacaaagtcacaggcagacttcaaatcaaggcagggagggagcaggggagaacacccagcctctctctccctctgcccttccatcttctgccaatgcctcccactggcccaacccaacagaggccagggaagccgaggggtgctgtcccatggctcaggcttctagagttcagaatggagcagaggagtggtgatctgagaaacagcaaaagtcaaaacaatcaccagacccctgagctgggttgtgttaggagctagggatgccactgagaccttagaggtgtgtgagtgtgtgcattggggagaaggggtaacccccctccatggagctgaaggtcggctcagcagcccaggcagtggtactgagggaggccagagccaccccttctgccaggagtgtggcggcattaggaaggcttccagggacaggtgacactggggccagacgtgaaagaacaggcagatgcagaagggaaaaggaagctcctccaaggaatgagggttccaggcagcaccctggacatggggccaggccacgggcctcggaactacgcagtgtcctggagaagccagccaagcccttgaattctgacccctctaattgagaacttgggtctcaggattgtgcagagagagcaggagcagatgagtcaaagacagaagatattcaaaggaaatggctggtacaaacgagactgggaggagaaggctgaagtggcttcagagagcctgttggccgcccgagggcccttcagcagcctcgtttacccacaaacagctgatctgcttgttacaaatcattccagcctcattagctacacctcctcctgatccctacctgtttgttagcttagttctaattatatgagagtcataaaatgctttaaaaataacctataactcacagttcttggaaactctggcgggtgcctcccctgagtaatgtggagcctgggggtttttacgacagcctggggttgccaaggggaaactgaggcccaagcttgtccccagaggagttctggctgaagtggtgtcacaagctccatctccagcctcagtgaaggagtgccccttcaagaaaccggcatgggggaggatgtttcaaaggtctactatgtaccgggcacttcacatgctttatcttctgggaagtcattatgcttcccattttacagataaggaaactgaggcctgaggatgtgaagggacatgctcaacatcccacagctggttgaaggcagaaccaggatttgaacttgagtctgtgttgttcagaacctgagctccttctcctaagccctgatgctctacagtacccttcaccctggccttgagctgatgccttcatttcgagcctggcctttgaccctcacctcactcccttggggaggccctgtgcctggcctctctgagtctcagcttctgcatctgtaaaatgggggcccagtagtccttgctggccacctcgttgccagggtgcaggagttaatggattcatgagcagctctccacagccctgagtgccagcatccacgtggaagggcggctgttagcttgattacaggcgccgcagcagcttccgggaggggaagtgtttaattgggggttttatttccagcagcagggtctggcttaatgaaatatccctgggcctcctggcatgtggctgccctgctgcctccctgtgttgacaagccttgagccaaatccctggctgtgatttaccagctcctcccaagtcagataaagctgggttgataagtagggctatgccctgacccaccccacctccagccaaggtgggcatctggggatcatgggcccagccaggaaccagcctggcttttaatatttgatgttaatgaagggtaattgacagatgcacttgcacaggctcactgagcgagggacacagtgatcctttgactctgtgctagtaatgcacacatctgtgcacacaccacctccccaccctcccaactggctctgaacagagggagcaggaatggtgcagcggccgggggtccacactggcaagggggcctgctgggaagagactgaatgttgagaaatctgagcccagaggaagggcagaggagaatggcacatgccacattctttcctattaacagcaagtttggctgctaacttgggacctccggaggcaaagagctggcggattttagtcttgactctgctactttctagttgatgatcttaggcaagttgtttggcttctcagaggctcagtttcttcatatgtacaatgggactaactgttcctaccttgaaaggtggttctaatgtccaaaggtgtcaggtgtacagtaggtgttcaaaaactgattctgtgaaggcacagcctatggaaagagcaagtaaggagcatgttgtgaaggaatctgcaacaaggcagtgcctactgtatgccaggccctgtgccagctgtgggaagtgcatcttactagcatcacacggttgcaggctgagtcctgggtatgcgggtctttagatggtttgtgtgcctgtggttccatggctgtgtcttcttttctctggtccctcaaccttcttcctttctccccatttcctcccatcaaagcaggctgctagtgcaggctctgacaccatctcattccgcatggagtcagctcaggtccccatcactgcttttgggggtatctacaggagaacactgattttgcctcacgtcagaagacttggccccagtgaagaatctcaggcatccatgcagcagataagagaggcatttgtgggcttgagaggggcccttcgcgttgctaaaatcagaccacgtgcctccccttctctgccgttgggggtacacctgattttgttcataaatgcgttcgaagggtattggaacaccatcgttcccactgctgtcagtttcaccattagattttcaggtttttgtttttctcccaggtgaagtatcttttaaaatgcaggttcttccagaaggagtcatgctgcaagctgacttgccccactgtgttaccagataatttctgtgtcttgaagggggacctggttcagggtttgtttgggaaaggagctgggaaggaggagaagaaagagcagggaggctgtcctggtgtctgggatcagggttaggggagggcaaggtccattggcaggccttgctgacagtgctggaagaggctgtcaccagactctgcagtaaagttgtccctgccacattttttgctagggtgaaaaatagaactcccagactagatggttgcccctgtcctgcacccctgagggtcaggccctggggctgccacagtccccatcgtgtacacacacacacacacacacagacacataacacacacacacacacacacacacacacacacacaccccacattaatgaagcctcttctcaggagactcagttctttttttttttttttttttgaggcagagtctcactctgtcgcctaggctggagtagttagtggcttgatcttaactcactacaacctcctcctcccaagttcaagtgattttcgtgcctcagcttcctgagtagctgggactacaggcgcacgccaccatgcctggctaattttttgtatttttagtagagatggggtttcaccatgttgcccaggctggtctcgaactcttgagctcaggcaatccacctgcctcggcctcccagagtgctaggattacaggcatgagccaccacacccagccgagacccagttctgactgctgtctctccacatgaacactgagcagccactgcccccagtgggcctctggtgccttctccattctctggccttcactccctccttcctcccacagctgggaaaactggtctttaaaatcttctagtcttttagaatgttgaactcttttaaagtttgtcctggctgcagcttctctccttggtccccctgttcttcctacaggtcaatatccccccaccctctcattgtgcccttttgtcccaagttcattggccctggtgtcaaacttaagttcccctacagagaggccaggaatgaaccatttcctcctggacgcaagtaagcagtggcctctatcagcctcacatcaaacctgaggccacaggccagccatctccctggtaggtggacatggggcatggtgggggacagcctctgctgggatgtgaatgggcacaggcaatgccccgccttgcctctgcagggcctgtgtttgatctctgttagtttccatctatgctcttcctttctcaggtcttttttgttttttctgtgtgagtcttgattctctgaagacagggacggtgccaccatcctcagacaggggagctccctgaggacgggggctggatccctttcctctctccaagggctatctccatttccaacctataattagagtctatgtgaaggtaggagctgggtattccctttttctatgggggatctccaaaggccaaggctgcatacgaccatgaggccgtgtactccttttagaccagggggtccttgcaggtaggtctgtgtctcctccatcagattagaacttcttatgggcagggctgtgtctctctctctctcagatcagtgctctgtcttccttcccttctcttgggaactcagtgccaaccttgttcccagggtctgctctccccaaggagtgtgggagggaggtgggcactgagtcctaaaaatcagaaatagcgagtgactgcggggcaggcacggctgctgctggtcggtgccagaccttgtcagtagtgtgatttgaggctggaggcagggacatggaactgagctaaactcctgtcatctcaaaggcatgaattcattaaactgtgtcctagggttgccgagaggcagggctgagggtggagctgaggagcccctgccttggtggccccctgtcttgtccctggaccaacagcgtatatgtcaggggaggaaggtccaggtgtgtgtgtgtgtgtttgtgtgtaaagaagggaaaaggatgtcactaactcagagtagtccattctgggggagcagggatagccctcagaatggggaggaaggggagcatctagcactgggcaggctgccctattctgggctgaggctcagggccaggtctccccaccccagtgccgcagggccacgtgtaccggttctgcacagctgaaggcctctggctgcagaaggacaactccagcctgccctggagggacttgtcggagtgcgaggagtccaagcgaggggagagagtgagttgaggcggggttctgagccagggagcggggagccatgtcttggagcacttcactggagcaaagacccttggctttgatgggggcatctgtggtcatttcatccatctccttgcctctgggggctttgcacaccatgctttctggacaaaggtggtgtgtattcaccactctggccttggaacagggcccaagatatccaagaaccatcgccgtaggttacggttattctctttcttggtcttggtatccccggtgagtcctgacttggggccccagctctgtctctttgccatgggaaggaagattgtgggaagagggccatgggctgcccatgtacacgtatgtcccccgtgtgccacagagctccccggaggagcagctcctgttcctctacatcatctacacggtgggctacgcactctccttctctgctctggttatcgcctctgcgatcctcctcagcttcaggtaaggtggcccggaccctgggagggggctgcttcatcctaactcccccagatagaggaatgaagcagcccaacaccaaatcaaagcaacagtgcagcacattcgtccttctctcaagagctctctacagagccctgaccgtagaatatgaggttgaaaacacaggatatgatactgtgttcttggtctagtctcccacggtgtaaaagtgtgcgtatgtactgcaaagaagaagaaaaataccacgcaagcaccaccaacctcaaaaccttaaccgtcggtgatgggattacggaaaatcccaggagatcttctccaatgaacatgtgtaactttaataatcaagaattcagtatgattttagaaaagatcttggggattagagatcttcctccctttggagctcttcagccccagtggaaaagttcctccttagatctaacctagatgagacgttccttccaaactaggagctgggaacagagtaccaggttcttcccactcctctgcacttggagaaggggggccagggggactgggttcaaagagggaagggaatctgagagaatgagacctcaggacaccaggcagcaagagcaggagaggtggcattccctctcctaccttcaaagcacctggcacagtcctgggcacatggtgctcaataaatgcattcactcaatgaatattctcctcttttattatgaattattccagtgattcaaaaatgcaatgactgatactatgatcactcatgcacacaccatccagcctaagaaataacatgtcccatagttacacttctctgggtaaccctctctgatcccatccctctccctgccctacacccatcagaggtaagccctgaatgtgcctcttttaattccgacacatttccttgtacttttaccacatttatgagtagctatagaaatatatagcaaggttctgtgtatttttaatagtgtattgaacatatttgtcttagtcttttcctgctgctatagcaaaataccttagactgggtaatttctaaataacagaaatatattcttcacaattctgaaggctgtgaagtccaagatcaaggcaccagcagattccatgtctagtaagttcttgtcctctctttccaagatggcaccttctcactgtgtcctcacatggcagaagggcaaatgggtgaaaagctctcacaaacaccctcaggtctcttataaggtactaatcccattcgtgagggcagagccttcatcaaccttatcacctaaaggcttcaccttttcatactattgccttggggactaagtttcaacatgaattttggagtgacacaacattcaaaccatagcattctgcccctggcccccccaaattcctgtcctcctcacatacaaaatacattcatttaatcccaatggctccaaagtcttaattcatcctagcattaactttaaagtctaagtccaaagtctcatctaaatattatttaaatcaggtatgtgtgagactcaagggatgattcctcctgaaggaaatttctctctagctgtgaacttatgaaatcattgaagttatgtgcttccaaaatgaaatgttgtggcaggcattctcatttcataggacagacattctcatttcaaaagggagcaataggtctgcatgtggtggctcatgcctataatcctagctaattgagaggctaaagtgggaagcctgcttgaggccagagattggagaccagcctgaccgatgtacgagaccattaaataaatacaattgtttatttttttatctggaaaaaaataaagaattaaaattcaaataaaaaaagagagaaataggaaggaagaaaggggtaactggtcccaagtaaatccagacttaatgggacaaacaacattaaatcttaaagcttgagaataatcttctttgactcagtgtcctgccttcctgatatggaggtgggagttgggtccccaagtctccccaaagccccactcgcacagctttgctgggttcagctcatgtggcagctctcacaggctggagttgtgtgctggtggctctaccagtctggggtcttggaggagaatcttgccccccatgactctgctagtcattgccctagtcaggactctctgtagcggccccgcacctgtgccttaactactatagatttattagaaacctccactctgcctgggccctgaggctctccaggatatcctttgaaatctaggtcttcctggatttcaaagaagtagctatgttccctacagctcgtgcactctgtgtgtctgtagagttagcaccacgtgaacactgccgaggtttactgctacgtcctccagagggacggcctgagttatacctgggcccacttgagccacagctagggtagccaaggagcactgcacccaagtgtagggagcagagacaggaggtggccctgggcagtgacttccaatgcctcacagtgtcctgggctcctcccccaaaactgttctgctctcaagaccctgacatctggacctgaaagatctctgaagtgcattcagggtcattcttccattttctacccatactaattttattaaatgttcacttggccacacccttggtattgtctcctgaacatgcttttgcattctttacaatatggtcagactgaaaattttccaaatctttaagttctccttctcttttgattataaatttcatctttcatttctctcttctcatattttgctataagcagtcaagggcagccatgctgtaccctcaatactttgcttagagatttcttccaccaaatattctatttcattgctcataagtctttgctcccatgaaacacttggacatagacacaattcagccaagttatttgccactttgtaacaaaaagatggcatttcctctggtctccaatgccatgctcctcatttctatctcagacctcatcagaatggcctttactgttcatatttctaccattattatgttcacaaccacttagataatctctgtgaagattgaaatttttggccgggcgcagtggctcacgcctgtaatcccagcactttgggaggccgaggcaggtggatcatgcggtcaggagatcgagaccatcctggctagcatggtgaaaccccgtctctactaaaaatacaaaaaattagctgggtgcggtggcgggcgcctgtagtcccagctactcgggaggctgaggcaggagaatggcgtgaacctgggaggcggagtgagcagagcagtgagcagagatcgtgccactgcactccagcctgggcgacagagtgagactctgtctcaaaaaaaaaaaaaaagactgaaattttctacatagctctcatcttcttctgagctctcaccagaatcaccttgtatggcccatttgtggaaatatagacttttttctatcccaccacccagttcccaagctactgctacatttttaggtatttgttacatgactccccactctcggtaccaatttctatcttagtctgtgcctgctgttataacaaaataccttagactgggtaatttttgaaaaatagaaatttatttctcataatttagagggtgggaagcccaagatcaaggcaccagtgggtttgatgtctagtaagggcttgctctctgcttctgagatggtgtcttctcactgtgtcctcacatgatggggaaggagtgaacactatgccctcacatcacagaaggcaaaagggcaaaaagggctcacaaactcacttaggcctcttttataaggacactaatcccattcttgagagcagagccctcatgatctaatcatcttctggaggcttcacctcttaatactatcattgcattaaggattaagttttatcatgaattttggaggaacacaacattcaaatcatagaaatatttttctataattttttggtccaacattatgtttgtgtgagattcattcacattgacacgagcagtcctgttttgtggatttttaaccaccattccatattccgttgtataatacagcacagtttatctgtcaaccttttaatggacatttgagttgttctctttttttctttctgaattacaaatgttgggtgcaatgtacattcttacttgtgcatttctctggggcatataactaggagtagaattgccaggtctgactaccacctgctttcgcaattttactatgttaagttgttcttcacagtggtcacaccagtttaccctctcatcagtaataaaagagagcttcctttgtctagccttctcaccaatatttagtgtcttcagacttaattgttgctaacctgaagtatgtgaaattgccttatgattttaatttgcatattccagattcccaaagagatcaagcattttttttcatgattttttctgtgagttgctttttcatatcctttgcttactttttcattggcttatttgggtttttcttttctattttacatattcattatatattctggatacttatccaggatttaccctctctttagtctgtggcttattttttcactcattttatggttttttatgcacagaagttcttcattttaatggaataaagtttatcaatttagtattgataaataaaatttatcaataaagattaagcagttgataaacagttaattttattgattggtttaaaattattcattttttccaaagaacaaattctggacagtcttattaagaaatctttccttggctgggtgcggtggctcacgccagtaatcccagcactttgggaggctgaggtgggtggatcacaaggtcaggagatcgagaccatcctggctaacacagtggaaccccatctctactaaaaatacaaaaaattaggtgagcatggtggcacccgcctgtaatcccagctactcaggaggctgaggcgggagaatcacttgaacccaggaggtggaggctgcagtgagccgagatcacgtcactgcactccagcttgggcgacagagcaagattccatctcaaaaaaaaaaaaaaaaaaaaaagaaagaaagaaagaaaaagaaatctttccttaccctagtgtcataaagatggccgtctatattttctgtaagtttcagagttttgctcttccttgtggttctttgatctgcttggaattcatattgcgtatgatataaataaaggatttcatttttttttctgtatgtggaattagctgcctgagtaccatttattgatagcctttccttcccccttggtttgcaatgactgccattccatgcagcaaggctccacgtatgtatgggttggtttcagtcacctacagtttttttctgtttatctttccctgtccggataccatggtgccttagctactgtagatttactagaaatcatatagcaaaatctcctcctctgtgattctttaggagtgtctggaatattcttagccctggctcttctttataagtttttaaagttctactttaaaaataaggtagaatttttatgaatacggagagacttgactcctttaaggtagcgagtctttctatctgtgaatgtgatgtatctatctcccactagtttaagtcttcgctaatgattttaagcaagatttataaaattctccatcgagatcttacctatcttctgttagactcatttcaagctagttaattaaaaatattgcaaaagaattatttctaaacatttacttttaaatttttttaacgcaggcatatacaaacatacttatcagcaaccttgctaaactgtcttattagttctaataatttgtccatagatttcttgaattttctatgaagataatctgccatctacaaataataactattttgtttacttctgattcttgtacatttttcccttgccttattatagtgggcaggatctgtagttacaatgttgactagaagcagtgataacagacatccttattttgttcctgatttcaaaggaaatgctcccacagtttctcagttaagattgatatttgcccctggttaggtaaatagccttcattaggttaagaaatgcccctgtactttcaatttgctacacattttcacatgaaaggatattaaaactctatccaatagtttctgaattcctaccaagtgcctagtcctgctctgcctctgtgaggcatttaggatgtgggccctgtcaacaagaagcagtgttcccactggggaaactgatcctcatgcataaatctctttggttatgcaagactttgtgtcaaagaagatgctgcagagagaaggatagaatgtggatgggaggagggggcagtgactacatagcggaagccttcatggagaggcaggatttgagttggacagaaggattttcacgatgatgaggaagaagggtattcatagaagaagacacacgcacagtcccagggctggaaacatgcctaatgtgtgtgttagcttgagagcctggggttgtagagcagaactgttggctgccttgccagggaaaggccctgctttctccctcagacacctgcactgcaccaggaactacatccacctgaacctgtttgcatccttcatcctgcgagcattgtccgtcttcatcaaggacgcagccctgaagtggatgtatagcacagccgcccagcagcaccagtgggatgggctcctctcctaccaggtgtgtggtgcatccaggaccgcctcaggagggatgggcggttggaggaggcctgcctctgccaccctagacaggcctgggacaggagaagacaagagccgaacagtcctggcccttcgggagcccccagtctgatgggagaggcagttcgccttgggaccctccagtctgctgagagaggcagtctaccttggggagctcccaatctaagggaggagacactgccctagggaattctcagtctgacacaaaagagtagtctttggagacacacttgagtttgaatgtcagctctgtcacttactatctgtacacttttaggcaagtcacttacttctctgaggctgagaaataggtgagaagtcacttacttctcacctgcagggggatacattactttcttccaatcaggatagtgaggattcaatgagctaaagcagataaagtccttagcactagccctagccagagatgtgagctctctcctcctgcattaaccatggcaggatagtggctggagcaggacggggagtggtatcaagagaggcagagggcagagctgttgtccccatgacacccttcctctacccccaggactctctgagctgccgcctggtgtttctgctcatgcagtactgtgtggcggccaattactactggctcttggtggagggcgtgtacctgtacacactgctggccttctcggtcttctctgagcaatggatcttcaggctctacgtgagcataggctggggtaagaaccgccatcacccaccctggacctgtggcacgggggtgggagaccttgacccctcttctaacatggtacttggaacgcactgctgagcaaggggcaaggcccactgggtaaccctcttcctgggcacaggaccttctgccccggtgctgttaagatgccgtagggggttatggtcctcccctcctctgcataactctcctcccttaatggaagcctccaccgcatgtggccaaacaccaccctctaccactatcatgcacaccactggaggtcgtggcactgttctcttaagaccacatggggacataagttcacacccagtcccgggcagcccgagggcctgagggaaatggtgagtcctgggcctcaaggtggggaggggatcaagagggtagggggctggctggggggagcctgctggtgctctgtcacatgacgatgaagaggagggctcagaggagagccaagtacagtggggcaggggggccagaggccagccaaggaaagggtggacggcggatgtgcctggagcccagctggaaatgttctagccaaaaaagtttgccaagaaccattgtgtctttttttttgctggaacatttctggttgtgcttctgcctctcaccacgtgggattgtaatgaggggcagcattggggttgggaagggggctgggatccccttcacccctgggaaaacatgcaacaggcctttctggagggacccacggtacccagagaataggccctgccctctgtcctccctaatctgccattgaatccatgagttttcctgttccacaccatcccccgccctgcttgccactccttcattcactcctccttccttcatgcgcccacctcacgctgctctgaccacggctgcccctgccacggacctccggggactttccagctcagtcacatccagactcctcttccctgacaatggtcctgtccctgagcctttgcaaggctgttctccatgcaggaatgttcagggagcatccttcccacaccagggtgtccgctgcctcttcaggaagctgcctcaggccaccagtcctcgtggttctgtgctctctgccctctcaagctctccatcccctgtccttgcacttcatttatttttactggtgttcctcagccatttttctctatacagctccccccaccccccaggagaagagtagcctgagagattttaatgtgaccagtgtcttgaggacaccaaggcccagagctggcagggccttacaggcagagcaggccctggaacccaggcctcctgactcccaggctctgggcctgcggccatcatgccctgttctcttgcctgggctgcatcccttcagtcccctgcagcacccctgagcaggctcaggcctctgcacaggtgggcaggtaggcctggctcctgctcacagatccctgctcctcacctgcctcctccactcccagaacccagtcccttccttggccttttctccccgaggcttcttcctcctgctagagcaggaggagggaggccatcgagggcagctcagggaaggctgtcttcagggtgggggacggtgtctgtccattctaggaaatagcatcagcgctgttagtgcctgtcaccatggcgacccgagggcaggaacaatcaagggacgtgtgtgatgtgtgcagaggagcgggggtggctggagtttggtggggacacactgccctagaggtctctgagtgggagatgggggagggagtgccaagtccttttcctaccacctcacaccctagctcagggctcggggtctgtgggagcacaagggcaagacccggaggacaccctgctctaatcagaacacctttttcttgaggattggggtgggggagacggagagagattcacaggttgctaggagctcagacgtgatgccaggaggccttgcccaagctgggatacttgggaaacaactttcagcttcatgtgcaagtggaagaattaaaattaggactctgacacagttggagaggtcccccaaagggcatggcagcttctgctgcagtccccaggcagttgggggcctgtagaaacccacatggaggctgtgcaagagggaggcaaatgatggttgagggaatcattacttcctggagccagttgtgtgtgtcttaatttgagcttttttctccaacctgtcttgctcgttttctaaatgggagaaagatgaagccagcagggagtgcgtaatgtttgcatgtagcagggctttcgtgactgtgttttttgaaaaggccttgttaaggaaatgctgacgatgagtgaaacttgccaggtctggctgataacatgggtgagtgccctgatcctggaaggaggtctcagagagaagggacagcagggggcgagggatacccagaaggaagcttctgcatgtgtacgtggttcaggaaatcggcatgctcttgcccagacaatgttccttcccttattggtgtgttgactcacccatcattcgttccattctcactgggcatcttctatgtggcagggcctgtaccatgtgctggggcctttggagaccatcccattccttgtccagtctcataaaggcctgttactaaagcaccgtagatgctgagaggtccgatttgtgtagaaatcaatgggccaggagagagagagctgatgaagaatgctggtccgctgggggctcctttgcctcctccatctctccctgcatcatcaggcacagtagatctgggcacacaacctgcttagtagctgctgttgagtggacactgatgtgctaaagacatagacaatggtgacaggaaaggctatgaagtggttctgtcctggaaatgtgctccaggcagagattcccaaagtcatacgtgcacactcatggtccacccaccacaccctcacacacacatgtctacataccttaatatgcacatgcttacctatctcagacacatctccaacactgagggaggggccaacggagacgagcatgcagacagccagtgcagaaggccattgagggcagtgggagtgggtatgggattgcagccctgaattcgagccccacctgtgcccttctgagtccctgatccatctcctcatatgtcatgtgaggaaggaaaatccaattttaaatcaaccaacacagaccctgagctctcagggtgatctgggcattgaggctctgaaggtgagtgaggcccaggctctaccctcaaggaactgggaaccagttgtattaattctctattgctgcagaacgattaaccctgaaacttagctacttaaaacaacgaaccattgttatctcacagttcctgtggcctgcaatctcggttcaacttagctgggtaccttgtggctcaggatctcacagagaaaactctttaggcaagagcatgtggatttcctgaatcacatacacatatagaaacttccttcttgggcatcccccaccccctgctgtcccttctctctgagacctccttctaggatcagggcactctcagagaagcagccagctgtcaccagggttgctgtcatctcaaggcttaactggggatggagaatctacttccaagctcattcaagaggcagttggcaggaagccgcagttgctggccaaaggctggaggcctccatttcttgctgcagagacctccatctaggccttctgagttctctcagcacatggcaactggtttcccccagagcaagtgatcagagaaagagaaagagaatgcaaaacaagccacagtgtcttttataacaatcagaagtgacatgccatcacttctgccagaggttcctgggtcacatgaaacaatgctgatacaacgtggactaactacccaagggtatgagcacaggaggtggggatccctaggggccatcttagaggctgtctactacacaagtcaagtctcagccgagtggaaagtagtattgttgtagctgttgttattgtaggccactgcggacagttagttggtcagctggcatcaaggactgggctcctgtctccattccaggattctgccgagccctcttgaaggtgcacagtggtagggaagagatgactgaaaggacatccagtgcctttaggagttgactggcaacgtgggctgaagcaagagagaaaatgggcatcagagggttcgcctgctccttgcctcatccgtcatgctgtccccaccgcatggcccagtcccgctgctgtttgtgtgtctgtggcctggtaacttagccgggactctgagggcaagtcctgacagtgtgcctggcacacaggaggtgggggactgatgactgatgaggacctctctgtaaggaagagtctgggggtccgcatggggctcctgctgcctctgttctcccaggtgcccagaaaaaaactagaaaacatagttggaggccaggcaaggagaggggctggaagtgtgaggggcttggggcagggagaggcctcggcatgtagactgtggctctggcctgccagcccctctccccttctgtctttccctctctcttaggtgttcccctgctgtttgttgtcccctggggcattgtcaagtacctctatgaggacgaggggtgagtgtcctgctccaagggggcgggtgtgcccaggtccccatcctcaaggtccatgggattccttggtacctggggcacccatctgttgagaggataaaggggggtaccaggagcttagaaggtgaatttagttctctaatctcccctccctgcccctgcccctgcccctgcccctgtcccaggattgtttgatgactaacggaactgggtctgtggggtacatggtgccctcctgcaggtttttctgtaatatctgcaagtgaaatgtttgtgtcattttgtatatgatgctgggtacacacatgactgtgttggtaggtccttgaaagcttgtttgggggctgtgtgcatctctgtgtatgactgtgtatttggactatgcgtatgtgttgtgtggctgtgcactggcagggctctgtgggtccatgggactggtttttgggtggctcctgggagctgtgtgtgtggcactcaacatggccatgtgcattggcggcctctgtgcctgcacctgagctgggggtcctgtgagtcctgctggatgcatgtgtgcatctctctccctccccagctgctggaccaggaactccaacatgaactactggctcattatccggctgcccattctctttgccattggggtgagtgatggtgtcagggatgggagtggcagctatgatagggctgggctggtgccccctgccaatccccggccccaccccgcaggtgaacttcctcatctttgttcgggtcatctgcatcgtggtatccaaactgaaggccaatctcatgtgcaagacagacatcaaatgcaggtgatgtaactgagctggctttactgaggaccctcagcaagtgcccctttccttctagcagagagagagagagagatcctgggatgcttagcttagagccctacactaccctctccttccacccaggcctggccttggaccccaaacccttgcttttgccctgtctctgggcagcccctggacttgttggggtcttgacctctattctttccctccaggcagcctgtcccagggtatttggggtgggagaacatccatgacccagatatcaggacttggtaggaagtggggagggtagagaaagggaagaagagtccatgggagaggtccagaatgactcgagatctctgccctgcccctcagacttgccaagtccacgctgacactcatccccctgctggggactcatgaggtcatctttgcctttgtgatggacgagcacgcccgggggaccctgcgcttcatcaagctgtttacagagctctccttcacctccttccaggtgacttcatgcttggggacacttgcttgtaaagtcctagagtgggggtgggacagacaccagcctgcatcatgcagatggaaaaggtgggaagactgggacctggaggggtgatccctgcccaaagtcacctagttggagcagagccagaactagtatccccaggtgtcccaatacctgggccagtcttctctgtaagcacatgggacaagaagccttcctggatgtagctctgggtaccagcctggcattgcagctgccatctacttggtggcgagcaccctgccaggtgctttacatgcattgtgcatttactcctcacagaacccaggagatgtgcagggttagcctcactttacagaggagcctcagaggtgttaaaaccagagttacggtgtcacagtttcaaagaaaagaactgatcctctccactagcattagatgatgctaagggggtgtaaaaatacaaaaaaactggtccctgcccctcaagagtgtcatgagatgcctgcacacatgggggctcatgtgtgtgtatttacatacatgtgcagacatacagaacacaattctggagccctgggtctccttcatgaacagatggggctggagtggggaatattctccatgatcagagtcattgtacttcactggatcaggcctcctcaaggagaggttggatgtaggatctctacagcttctgggcagcttctgaggagggtctcctggaccccacagcacatgcctgggagacccatggggagaggctagctggggcctgtagccaggcctagtcgcagaggtgcaaccctggtgttccttcagaaaggaaatgagagggaagccactgccccattcctggatctgcctgggccgctggatttggggagggggttgttgaggatggagtcccaaagtgcttccgaccagggccagtctgcagggcacctccctcctgcttcctccctcttgatgtgactcttgtttccaggggctgatggtggccatcttatactgctttgtcaacaatgaggtaagctctgaggagggacggtggggaccctggtgggtgggtaccatcagcccgtctggagtagtacaatggggactcccatcaatcttgccagctgaaaccccctactcacctcactgaggcactagggttgagaagccatcttgtccacagatttggttttctgtgcatggtctctctcacacatgaacacacacacacaagtacatgtacaggtataccctaatggcatgtgaccctagggaagacccagactcatgttaaggggatcctgaatgaccctctttgcttggtggtagtgactgtcacttacaaagtgattcaacacacacatacccaagccacatgcttggggctttaataatcactatctcatttaattatgacccccacatccctcaaaaaaaaccctgctaaaattcttatttcatattcccattttttatatatacatgagaacactgaagatcagaaagagtcaggaacctgccctaggtttggaaatagtggcacacatcgcttcttagccttttggctaaggtgaagtgtggaaatagtggcatggcagagccaggattcaaattaattctgcattaaagcagaaagtaccccattcttcatacacacaggcaagagccctggctcactgtggggaagggggtggctttctggtgctaggatgggagaagggggttctcgctggccccacacactctcctgaaaatgtctgcaggacagcaggcctccctcccatccctgagatggtcagctcctgggaggagggcatggctgtgttcatgggcacctggaaaaggccccttccaccaaggtactcagctttggaatcccagagctcagggatgttggagtcagcacattaataggcttgtctttttctatgggtgtgggggatgcagaaaggacagtgggtggggacctgggtgtttcaaggagctatgagatggctcaaagaagcaatgtgatgtagcagaaaagatgcaaggatgcaggctttggcatcttatttggtctgatctgggccccatcacttaatgagctgtgtgactttgcctaagttacctgcccactctgaaacttagtttgctcatttacaaagtggggataatcctgtgaggattaagaaagtctgaaaaaggtgcgaaaggggaacagagaacaagtccttccttcaaggtgggatgctgaaggcccatcctagctcctcacaggtgctgcttggcatggagaaacacacaccattatctccagatgctcagtaagcaatcactattagatcagtattcagtgattcccagagacaggggcctaaggaatttcagaggatgccgtgcagagaaaatgaggctgggtgaaagggaagggaggggaatgttcccttgtccctgaggcctccccctgcttctgctgaactggctacctgtgggaagtgtggccctcagatctctaaatgggagggaaaccaaggtctcttaagggtttactgcatataaggtgctcagagtgtctcattacatccaatgctgtgcagcagatggtatccccaattcacagctaagaacgttaagcctcagcaaaatgaaatgagtagcctaattcaatagacagaagatggtagagctagtgggctgtggcgggggcaagatcccacttaatgcctcagggaagcaggtgctggggaggtgaaggcagcgccaggcaaagagtggcccataaatgggattctggctgctcctgggacaggtcttagaggacccagcggctccgtttggagggtagggcagggaacaggctcgtgacccacaggaggcagtcctggtcctcctccactgccatatcctcaaaatgagtttctttaaaactgatgcaaacgaggaagtgcaaaaacctaagctctgtgggtggcctcccctccaggaatgctctcagccagctgggtgatgcgctacccagccctgagctctgctgctttccattccagcccagtggtgatgggggcaagacagggtggcatgtatcctgtgtggggatgaggagcagaggcctgtagggagagactgaggctccctgctgccaccttgtcatcttgacccccccacgtccccgtttctcacttctctatcctctgacactgtcactgcagccctactagcagacacgtgtgcttggcttcccccccgccattgtgaacagtctcccctgacccctggctcagctgcctctccagattccatccttccaagcctagtcatctcatcacctccctcctcatgcaccacctatggctggcccacctttgtaaggggatagtacttctttgcccttggaaaaaaacttgatcctgaatcaccagggttgcacctctctgaccaggcctggctacagaccccagctagcatctccccgtggatcttccaggctagtgccacggggtccaggagaccctgctcagagaacgggagaacctgtctcccttcagagcaccagccagttcctttaaacccaccctgagactcctcatgccctggctgctccaggcacaaggacagatacatcattgtcactgggccacaaaagacacatgtggctctggggctaaggcctctgtccacaagagctgttctgcagacccagggttgccatggcaatgccaggtacttgtgacctgaggagaaaagatggcttgaatattggttctgtgtggctgccaaggcctgcaccagctgctggtgggcgtgagtggggacagggagggggaggcctgaaggtggttttgctgtagcttgtgcctgagagccacagtgaggtgactcagagccctgagtgcttgtcccagccctgccactgccgagctgtgtgacctggggcaagtcattttgcctcccttgcctctgtctccccagccgtaaatgaaggtgaatgagcttcccaattcaccccgaatcctgaggctggcatggtgcctgctggagagggaggtcaggaggggtgtgctgcactgcagaggtcgagggcagggatgaggataaaaatccgatggtggaggaggaagtgtggtggcctaagtcccagcccaggtgctcagaatctgtggtgttgtctttgtgggttcattttcatagctgaggaacagaaggaacctgatgtgagatgctcatgcatttatgtgttcattcatttggttcatttaaaacacatgtactgagcacctgctgtatgctgggcactgtgctaggttcagggatgctgagatgaagaagatgtggtcccagccctcgaggtgctcccaggtgagaggtaggagatggaccagggacaagcaggactgcaagagccacgcaggcaggaggccaggggttaggagccgggcattggaatcaggccagatctaggttcaaatcctggctgagcgacctgaggaaataaacactctgcacctcagtttcctcatctttaaatgtggagctactttgcagggttgatgtgaaagtcagctaagataattaatggaaaattctgtgcatacagtaagtgcccaataaatatggtgattttcaaggacaatcgtgattacaggggtcacagcagaggttcaggaaaagtgctgaaggagatgggggcagaaggagacactgtgtgtcagcaccctgagaagtcccataggtgtccctgaaacctctctttggtctctggtttcccggaggtgtgcctcagtttaccatctttccccccctctccagcggaagggctatgaaacaagcctggcctcctggcagctgcacaagtgggggccaccactggactcagggcccccatcccagctgtcagcatgcgctcccttcacaaagactcagccgggcagggagctggcatacaacagggtggctgtaggtggtgtctgctcagcctccttccctcccccactcaagcttgggttcatgacgctgcatgggacactggcgtcatcctggcaggcagcctctgggccatctcaactctactcagtgcagaaaatgttcttttaagggatggcatgcagccataccaggcgtcttgctgggcatagctggatggacgacaaaggaggagaggagggttgtttgcacaggggctggtggggagattggccccttatccacagccgctggcatctggctgtcttggtgacttggcctaaagggaagggcccagaccccagacactctggtgtgggaagggtggggacttcaaagaagctctggaaagcaaatgtatgggaacatcacccagaagagcagtccagaccccccaggactagcttggcaggttccagctaggcctctccagggaccagaatcactggccaccaccgggagccacagcattgccacaaaccctcaagggatgggggctccacagtgttacttggatttgtctctttctgccccaacaatctggcccccaagcatcagccctcctgagaggcttttcctgatggggaggccagagcccagcacaacagggatcctggctgactgagctcccctgggctgcacccccatggtcactgcagtgtctctctagatggcatcagttgagaagccctcactggctgccccttcctccctgctgtttcccgtctcagccacattccttccttccctccctcctcccctgtgaggtgctggggcctggagagaagccctcagggagtttagaagggtctgctgtagacaccaggaaggctgggggttgccgtcccccttctcaagcatccaagctgaaactggactgtgcgctgtaaagacagagtctctcttctctctcccatctcctgtctccctgtgtttcaccctccctctcattctcttccgttaaataatactgtgatggattgtaaaaggtacttagctgaatcacagagtttagagatggaaaagaccaattaggtcatcaagctgatctctctcctgaggagctgcagaaaataggagacaacaataaacaattttattgggatattaatttaggagcccgaaggccttgacttgtgtctcttaatataatgcagtggatttcttcccttccccactaatgtaatagtggggccattttgttagccattggtttgcatgatggctttcgtttccctccttttcccatggaaggtccagctggaatttcggaagagctgggagcgctggcggcttgagcacttgcacatccagagggacagcagcatgaagcccctcaagtgtcccaccagcagcctgagcagtggagccacggcgggcagcagcatgtacacagccacttgccaggcctcctgcagctgagactccagcgcctgccctccctggggtccttgctgcaggccgggtggccaatccaggtgggagagacactcccagggacaagggaaggaagggacacacacacacacacacacacacacacacacacacacatacatcctgctttccctccccaaacccatcagacaggtaaatgggcagtgcctcctgggaccatggacacattttctcctaggagaagcagcctcctaatttgatcacagtggcgagaggagaggaaaaacgatcgctgtgaaaatgaggaggattgcttcttgtgaaaccacaggcccttggggttcccccagacagagccgcaaatcaaccccagactcaaactcaaggtcaacggcttattagtgaaactggggcttgcaagaggaggtggttctgaaagtggctcttctaacctcagccaaacacagagcgggagtgacgggagcctcctctgcttgcatcacttggggtcaccaccctcccctgtcttctctcaaagggaagctgtttgtgtgtctgggttgcttatttccctcatcttgccccctcatctcactgcccagtttctttttgaggggctttgtttgggccactgccagcagctgtttctggaaatggctgtaggtggtgttgagaaagaatgagcattgagacggtgctcgcttctcctccaggtatttgagttgttttggtgcctgcctctgccatgcccagagaatcagggcaggcttgccaccggggaacccagccctggggtatgagctgccaagtctattttaaagacgctcaagaatcctctggggttcatctagggacacgttaggaatgtccagactgtgggtgtagattacctgccacttccaggagcccagagggccaagagagacattgcctccacctctccttggaaatactttatctgtgaccacacgctgtctcttgagaatttggatacactctctagctttaggggaccatgaagagactctcttagggaaaccaatagtccccatcagcaccatggaggcaggctccccctgcctttgaaattcccccacttgggagcttgtatatacttcactcacttttctttattgctgtgaatagtctgtgtgcacaatgggcaattctgacttctcccatctagtggaaatgagcgaaatcatggttgtagtgatgttgtttgggagagtgcagtagtaattgatttgacccactcacacttggagctaattaaggtttgccctgcctgcagcctcccccacaaataatgaacagcagaaagactggacggggaaacctatcaatcctgcccccagccatggtgaggaagccccaagccatggtgacacacagcagcactgcagatagccagacacatggctatcctagagaggctggcaaggagttcgtggctgcaaaagaagtttctggagcaagagagagctcgctcttgggagtcaggacctccggggagagcagagggttccgacggattcctttatgagtcagtctctctctcccttttaaatggtgggaaccctccccaaaacctttccccagacacattctcctgtgcccctcagagaggcatgtgatgtgcaaggaaaataataggatataaaacacatcaagtagaaaatttcttatacttcagcttcagtgaagtgttgtctatgttaataggcaagttgaacctcgggctaaagaaaggaattgtgtggatggctgccttgactgagacaatatgggcaggggggcgttcctgcttccccagaacaagggcaggcttcccaaaggcaccccttatttgctgtctcttcgtaagcgtgggcaccagtgggttgatgtgggaaacagtgctggtgcaagtgtttaagttttggataaactgaggattttgagaatcattattacattacatagcaacaaagaaacagattgatataatctgtgtgaaataaattgctgaggagagggattgtagggaagaagttgcttagttaggcacctgggaagctcaaatcatttagtttaaact

SEQ ID NO: 169 - DNA, 9644 bp, Human
ttaggtattagagggtggccattatttgagagtgactatgaccacagttaatctggtaataaattctcttgggtaggaggaaaggaaaggatgctttaaggaagcatcttgccgggagacacaaagctaacaagagtggagcctgcagctggagccgcagagcctaatcactacacccgcccatctctgctagggtttcatgacttcgtatcggggattagcagtatttaactctgttgcacaaacatttggtgtattattcaggtaacaagtagctaatagaggaagttttacttttttaagacataaatttgccttttcccaaattacttggtacatagtacttttcatgtttgaagttgagatgtgggtacaataccatagctttattccagagcagggtatttgtttccaaatgccatgttcccagcagctgcccttgactgggaattggggtgtgatttgggcttttccttaaatccttgaggagctggaggggtgggtggctcgcactcctgctttctggatctgaatcctgactctgtcatggacctgtttgactttgggcaagttgactcctattcctgagccccatatttttctcttctgtaaaattcagattaaaaaaacatggctttgatcaaacattataaataatatatagacagactgcttgtttttattgtattgccagaaatgaatcctactaatattgccatctatggacagaaaatgtattacctgtcttcatcaagacccagacgaggaagaacacgaaaagcggagattaattttactgccatctccagaaccgtcatcctaatatttacttacattttattattatttcaggctcatgcacatatacttagcatggatcattggccacagactcgcatacatttaactttattaccttttgcctcatgtatctcattaaaattttgctgcttaatcaaggatctgcatattattttaattttagaattcacagttccaagactttgaaagtttcaagcgttctgggtgaatgtgttatgctctctcccgccaccatgtctttataccccctgatttctcagccactatggcaaccactttctactcttagtagcccatatttagtccaatccccagctcaggagacacttcttccagggagccccctgtgccttccagtagtatcttgtacctgccctttttgcaaagctctttcctcctggcttagaatggcccattgacctgtttgtttctcctattaaactgtaagccactcgagggtagagagcatctgttgttcaccattgcatcctcggtgctgagcactgcgtctgacatattatttagaaggtcagtaagtgctagtgggattcaggctcccagtgggtgggagagaaaggacgtaaggaagcaagtggtaaaggccctcacagagtatcagcaggctggtgtgagggagaaatgcagaggatgggtgagtagcataatcgctaatgatagggtaatgatagagcacatttcacaacacctttaagccctttcacgtgcatcagataatttgatcctcataaaagcctagagatagatatattacagggatgaaggtggagtattttgtggttatgtgatatgtttaaaattatgcagtgagtaaatgactgggttcaaaccagaccttaaaagtctgttatctttccctcgagcatgcaatgaagtctacatcatccctaccatgtccatttgatcacaccctggcctcacagctctgtggtctacaggatacctcatggtggttttattgaccagacaataatcctctttctaaggggatgcatttcattaatacatatgtagatcatgaattgtctttgactttgaggggatggtagccagagcagaaagcaaagctgattttcatccccgtctggtaatgtggttggtaatgtgaagatgggtgtattctgagataccggctccttgcagtgtgtggttccttctgttttcaggcccaagaagcccatcctgggaaggaaaatgcattggggaaccctgtgcggattcttgtggctttggccctatcttttctatgtccaagctgtgcccatccaaaaagtccaagatgacaccaaaaccctcatcaagacaattgtcaccaggatcaatgacatttcacacacggtaaggagagtatgcggggacaaagtagaactgcagccagcccagcactggctcctagtggcactggacccagatagtccaagaaacatttattgaacgcctcctgaatgccaggcacctactggaagctgagaaggatttgaaagcacagggctccactctttctggttgtttcttttggcccctctgcctgctgagattccaggggttagtggttctaattctaaaccactccaagaacatttgattttgctacatgtttccatttaaaaatcataggatttgggctgggtgtggtggcttgtacctgtcatcccagcactttgggaggccaaagcaggaggatcattcgagcccaagagttcgagaccagcctgggcagcatagggagaccccatctctacaaaaataataaaaaatgttagctgggcatggtggtgtgtacctgtggtcccagctaggggaggctgagatggaaggatcacctgagcctgggaggttgaggctgcagtgggccctgatcatgccaccgtgctccagcctgggtgacagagtgagaccttgtctcaaaataaataaataaataaataaaagtcataggatttgatcaggcatgatgggtcacatctgtaagcccattgctttaggaggccaaggtaggaggatcagttgaggccaggagttcaagaccagcctgggcaacatggcaagacctctctctctaatttttaaaaaaataaaaattaaagataagaaaaaaatcataggattctcatgaggcctcacgtgcttattttcaacctaccaaggggaaacccaggcctcagcgattagctgagccacatgcaggcacagccactgtctctttccttcctgtcccctctgtccccaccttctgcgctcgccttcctccctgacttcacttccttgaatcttagtgcctacgaccagagggagctgtgaagttccttgtgtcccattggcaggtacaagacccccagaagcatctcctcagggcctctatcccatctctagatgtgcttgtcattagggttcttgtagttccagctgatctctggccctgccgctcaaagatacccaaaagagcgagtctaccctttttcacattcaaccctctactgatttgcaaatagcagtcagtgcccaccctggtcttttctctggggtccagcaggcctagaccttcagccattttcctgatgaggtctgtatttgaaattaggaagattaagtttgaatcttcacacttctgatgtctgtgagatcttcagcaagttccttactgtctttaagccttgttttcatcatctggataatggggatatcacacactattcacaaggttgttatgaggcctaaattagctaaagcaattgaatcctccttaccccctgcatggagctctctggagacttccacgtctcctggtcattgtgggtgtcttatggtagtcttgggcagttagggagaagttaggtgtctggaagcaaagatggctcagaactagatagagtcttgggcattttatagataaaaactcttgtctcctttaaaaataataaaaaaaaattagctgggcatattagccactcagcaagactgcacgtgatagatcccgagtgccccaccttgggtggtgtaatacacgatatcacgggagccccgggtagtaaccacggaggtgtcagcctcagtgctgtgggcagatggatggggagagcctcccggaactggagtcactggagcagggttggggggcctcactgagggtacggccttgatctctaaggaggagggactgcctggaaaagctgactgggagggaggactcggctgggggtagaagggactagggaaggctgggggtgggggtgcttatggaggacctcagatgcctggggaacagactccactaaataaaacatatgaaaccatggctggttcttcagcagaggccatgtagagaaaggaatgacctaggaaagttggcctggaagtggagggaaggatggtgtgggaaaagcaggaatctcggagaccagcttagaggcttggcagtcacctgggtgcaggatacaagggcctgagccaaagtggtgagggagggtggaaggaggcagcccagagaatgaccctccatgcccacggggaaggcagagggctctgagagcgattcctcccacatgctgagcacttgttctccctcttcctcctgcatagcagtcagtctcctccaaacagaaagtcaccggtttggacttcattcctgggctccaccccatcctgaccttatccaagatggaccagacactggcagtctaccaacagatcctcaccagtatgccttccagaaacgtgatccaaatatccaacgacctggagaacctccgggatcttcttcacgtgctggccttctctaagagctgccacttgccctgggccagtggcctggagaccttggacagcctggggggtgtcctggaagcttcaggctactccacagaggtggtggccctgagcaggctgcaggggtctctgcaggacatgctgtggcagctggacctcagccctgggtgctgaggccttgaaggtcactcttcctgcaaggactacgttaagggaaggaactctggcttccaggtatctccaggattgaagagcattgcatggacaccccttatccaggactctgtcaatttccctgactcctctaagccactcttccaaaggcataagaccctaagcctccttttgcttgaaaccaaagatatatacacaggatcctattctcaccaggaagggggtccacccagcaaagagtgggctgcatctgggattcccaccaaggtcttcagccatcaacaagagttgtcttgtcccctcttgacccatctccccctcactgaatgcctcaatgtgaccaggggtgatttcagagagggcagaggggtaggcagagcctttggatgaccagaacaaggttccctctgagaattccaaggagttccatgaagaccacatccacacacgcaggaactcccagcaacacaagctggaagcacatgtttatttattctgcattttattctggatggatttgaagcaaagcaccagcttctccaggctctttggggtcagccagggccaggggtctccctggagtgcagtttccaatcccatagatgggtctggctgagctgaacccattttgagtgactcgagggttgggttcatctgagcaagagctggcaaaggtggctctccagttagttctctcgtaactggtttcatttctactgtgactgatgttacatcacagtgtttgcaatggtgttgccctgagtggatctccaaggaccaggttattttaaaaagatttgttttgtcaagtgtcatatgtaggtgtctgcacccaggggtggggaatgtttgggcagaagggagaaggatctagaatgtgttttctgaataacatttgtgtggtgggttctttggaaggagtgagatcattttcttatcttctgcaattgcttaggatgtttttcatgaaaatagctctttcaggggggttgtgaggcctggccaggcaccccctggagagaagtttctggccctggctgaccccaaagagcctggagaagctgatgctttgcttcaaatccatccagaataaaacgcaaagggctgaaagccatttgttggggcagtggtaagctctggctttctccgactgctagggagtggtctttcctatcatggagtgacggtcccacactggtgactgcgatcttcagagcaggggtccttggtgtgaccctctgaatggtccagggttgatcacactctgggtttattacatggcagtgttcctatttggggcttgcatgccaaattgtagttcttgtctgattggctcacccaagcaaggccaaaattaccaaaaatcttggggggtttttactccagtggtgaagaaaactcctttagcaggtggtcctgagacctgacaagcactgctaggcgagtgccaggactccccaggccaggccaccaggatggcccttcccactggaggtcacattcaggaagatgaaagaggaggtttggggtctgccaccatcctgctgctgtgtttttgctatcacacagtgggtggtggatctgtccaaggaaacttgaatcaaagcagttaactttaagactgagcacctgcttcatgctcagccctgactggtgctataggctggagaagctcacccaataaacattaagattgaggcctgccctcagggatcttgcgttcccagtggtcaaaccgcactcacccatgtgccaaggtggggtatttaccacagcagctgaacagccaaatgcatggtgcagttgacagcaggtgggaaatggtatgagctgaggggggccgtgcccaggggcccacagggaaccctgcttgcactttgtaacatgtttacttttcagggcatcttagcttctattatagccacatccctttgaaacaagataactgagaatttaaaaataagaaaatacataagaccataacagccaacaggtggcaggaccaggactatagcccaggtcctctgatacccagagcattacgtgagccaggtaatgagggactggaaccagggagaccgagcgctttctggaaaagaggagtttcgaggtagagtttgaaggaggtgagggatgtgaattgcctgcagagagaagcctgttttgttggaaggtttggtgtgtggagatgcagaggtaaaagtgtgagcagtgagttacagcgagaggcagagaaagaagagacaggagggcaagggccatgctgaagggaccttgaagggtaaagaagtttgatattaaaggagttaagagtagcaagttctagagaagaggctggtgctgtggccagggtgagagctgctctggaaaatgtgacccagatcctcacaaccacctaatcaggctgaggtgtcttaagccttttgctcacaaaacctggcacaatggctaattcccagagtgtgaaacttcctaagtataaatggttgtctgtttttgtaacttaaaaaaaaaaaaaaaagtttggccgggtgcggtggctcacgcctgtaatcccagcactttgggaggccaaggtggggggatcacaaggtcactagatggcgagcatcctggccaacatggtgaaaccccgtctctactaaaaacacaaaagttagctgagcgtggtggcgggcgcctgtagtcccagccactcgggaggctgagacaggagaatcgcttaaacctgggaggcggagagtacagtgagccaagatcgcgccactgcactccggcctgatgacagagcgagattccgtcttaaaaaaaaaaaaaaaaaagtttgtttttaaaaaaatctaaataaaataactttgccccctgctctttgtttcctgtcgccgttcctggaggggcttcgggagagctgtttgtgtgtgacagggcaaggcctggctggcccccatccatcactggggtcagctccgccccaggcttggccacagccagccgccagttattcaggcaaaaggattaccctgtaaagaaaacagagctgggtttggacgctgagaggactgggaaacaggttgcagggaggcacaggaagcacacaccaagagccagagagaggcctctgtgccatcccaaggaatgaggacaaagagaggggtcctcgggaagaagggatccactttggagaggccccttaacacgggacagagcaaggacagaaagaggcatccactgggatggaagaaggacaggatccacagggaaagagggatgaggggaatgaagagagaagaaataaagagttcagcatcacctcatgatgcaactaatttggcacaatgcccagcacaatgtacccctccattctgatttggtggccagaagaattgagattcttgggccaggcacgatggctcatgcctataatcccagcactttggaaggtcaaggtgggtggatcacttgagaccaagagttcgagacaagcctggccaacatagcaaaaccccatctctactgaaaatacaaaaagtagccaggcatggtggcacgtgcgtgtaatcccagctacttggcaggctgaggcaggagaatcgcttgaactcgggaggcagaggtggcagtgaaccgagatcatgccactgcactccagcctgggtggcaggtgagactctgtctcaaaaaaaaaaaaaaaaaaaaaaattgagattcttggatagcaagcccattatttaacatgtaagcaaattattcaaaaagcttaaaacatacctatcaaaggttagactccttattagtattccgcttaatcttaatttgttcaacaaaccattctgagttcaaatagaggtccaaatcaactgtataaaagataactttgagatgaggaaaatttaaatgggggctctgttttctttctttctttctttctttctttctttctttctttctttctttctaacttttttgccggtgacacaacctcagaagttcctgagaacatgtgtcccaattccatttcagatgctgataagaaattctagttaattttactaggtataatgatggcatggtggtgtagttattcttcagtgcttccttatgcattcgtgatagatgcaaacagaagtttagggtgaaatagcacaatgcctgggattaaccttaaaaaacttcagcaaaacaatttatcttataattttttataaatattatataaactttatataaataactatatatctatatatatatatcaacaagatcagcaaaatgttgagaattgctaaagctaagtgacagatacatgggagtccattataccagaccctttccttttgggtgaaatttccagaagaaacactttttggaaatgtccagttcagcctggcccgtcccctgcctgggcaatgttgcattcctgggaaggaaggagaggaggtggggagagaagagggagaaggagaatatgacgtggagctgagctgtatttaaagagcacatttgatttcactgcctggcagatgtcccagggccttggggggacagcagactgtcagtgcgggtgtgaaacagtgaactaagacagggatttagcaaatcaaacaaggaaggaatggtaagaaccagctgcaaggggcagggagaggcatgtcctgaagctcacaggaaaaagccaaagcagcagacatcagggcctcaagctctgccccagtcctgctgggcctcaggtgtcccacagaagccaactccccccacccaagggggcatcgtggtattcctgctgtgcagctgttcctccatattaaataacactgtgtaggcagagaagcctttagaccatttgtaaccacgcaatgggttcacct

SEQ ID NO: 170 - DNA, 15232 bp, Human
ccccacggccccccttccctgtttgttcccaccttcccttgggaagaatgctaaagtttgtttatgatttccaaataatatgtagcccttaataacttattcagagtatcacgagcaaggagcccttcggttatactcataaatggcagcctgttgcactgtgtatctctcccccagggaagcaggaggggggcctggcatttctggattagccccaggaggacttttcctgcttctgagtggacagaggatcatccttggaaaattgctcttctgagattgaattccagatcctacatccctctgtcaatctgcctgcaaggtctgaagctggtcttagaccctctggtgctatggtgcccattaaacagacactgtagtctcctgttaataagattcaattaggaaaggggtggagaagggcactcaccgcctgagagtgtgtcagggaggcctgagtggctgccttcatttcgcgcctgctggaggcaggagggaggaaggtggtgagctcgctcagcagggaaggccaggctgcacccacctccctgggggctggggaaactcagggtgacctccagagcctcaggtggcagcttactgtatgatcgaggtgatttttaatgtctcagagcagccccagggtcagcagagacagaccaagctgtgccatctggaagggccagcttcgaatctagttctggcccctagggttgcaccagtgacttcaagcctccaagtctcagtttcaggttctttgattcttgggtcaagtgaagggtggagataagctgccttctaccaccacgcctgatacttaggaaagccccaatatctgggattgtttttgttgttttgttgaaaatatatatatatatatattttttttttgagacggggtctcgctctgttcaggctagagtgcagtggcacaatcttgactcactgcaacctccgcctcccaggttcaagcgattctcctgcctcagcctcccaagtagctgggaccacaggcatgcaccactatgcccgactaatttttgtatttttagtagagatggggtttcgccatgttgcccaggatggtctcaaactcctgggcttgagcaatccatctaccttggcatcccaaagtgctgggattatgggcgtgggccactgtgcctgccctttgttgctgatttttaatccttacttccactttacagatgaagaagcagagatctaaaagcatgttttttgcctgcaaatgctgacattcacttgtcttattgctaggaagaaatctctgtactttcgcggtctctgggagggcccctggtgagcagactgtccctggacctggttggaagcagtcgtggagctctcactactcccagcttcagctcagttggtccttaaaaagtcagttctctccccttgccataaatccccaccgtctctaactcccatcactaccctaaagcaaagtaggttttaaaaatgccagtaacacaagtgagaaaactgaggtcatttaacgataagtttgggagtaaaaccaaaaacaaaaaaggaaactgaggcccagagaggtgccataacttgctcagggtcacacagcacgtaagtgccaaaggcagggagctgtagctgctccagcgtggatatgccagggactagtgacaagcccaacccctccagcccaactccacccttcctcatgccaacaaaaggagaatcatttcctatttctggcatctttgccagcccacagagacagagagaagaagaaatatttccaaatataccaggctgatctttcgtagtttctcagtcttgctgtctgttgtcgtttgaaatctgtttcccacgagactctgggaagatggaggtgcagggcttgggtaacagctgccttcctcagggctgggtacctgctctccgagtctgtgtctccaggctgtgtgctcagacttgaccatgtttgggcatggaggcttgccccagatggggaccaaaagctgcttccctggagacgggcggggaggccaaacttcctgctgaagctctgtggcctcttttggggtgggggcgggggtccaggcagaaagaaaccgtctgctgctcaagacccacaggacgccgggaagactgtgagtaccgggcctgaaagcacttgggaagtgatttctctgaagaccgggctggagggagacaggggaaagcagcctgccacggggcagggagggaggcaggcaggaggactcccttcctctcggggctgtccttctggatggagggcccgtggtctggtggccagtggggagggtggcacagtggccaggttactctggtagtaagcgccctggccctctaggtcccagttctcagagtggccagaaggctgcagcctggagattaacaccaatgctggcacttgtcaccggtagagaggtgggacaaaaatagattcatcaagaggggtccagacttctgctccaaactttcagggtttccttcgttagtagtaatagctaatatttactgagggctgatttggggctaggtgctatgatacatgtctgatactcaatatggcatttgatctttagctgaactctctgaggcaggtaccatggttctcgtttcacagtcatgtggttgctaagtgtaagtggcagagccaggatttgattccatgtctgaggacctcagaatcgccctgtccacaccccaccaaactgttcaacaatgtactctattccttgtccttctaaggaaaaggatgtcgacccagctatcaggtcacccaggacactccaaagtcctgccttcctttgtccttctccatcttctctgaatctatcccagatctcaagtgacctttctaaatgggaagatatatcctggaacttcagagatatttagaaatgctcaaaactgggaagttcttcttacagtctaactgaaatccctcctatgatagctgaaacccacttcttccttttctttctgtcccttgggggatattgacagttcccatccttcctcccgccaaaggttctccctttggatgctgaatactaacttcttgctgaagtcatatctacactgaaccccacgcatggtcttaggaggatttatcatgactctataaactcactcagtgcaggcaacaatctcatcagaccattagagacgggtcagacctgaataagccaagtttccagacttctctgtgacagggaagcctctcctttcctttccttctgagctcctaaaactggtaaaaccaggttcctgccttcaccagcctcaggagtgcccaggggcctgagagggcactagaagccaaatagcagaggaggccatggccctgggcgctggggggggctgattagccaggaaggagccacaggaagcccccacaggtgcgatccagttcccccaggagagaaatggctttgttgtgggcactcagccctaggcttccaagatgggatttcccattggcttcaaatgatttatgtctcacagtatctggggtggggccaagtgccagtgacccttgcaggtcctggggaagcaggctgttggggcttttagcttacctccaggtgattctgttgctttacctgtgaatacatggagagtcttgttcaactgacgccaggtagaaaaaggcatgggctctcccattcccacaagatcacagaacaggaggaaaaggattgaataaaaagagttgaataaaacatctctctttgtcgggggcaatttctgcttgcttgtgcttttataatgtctccattagaatgcaggagaaactcacctcctggtgccaaataaaggagaaaaagttgtcattggatgtcacctctgccgatcgataggggaggtggaccagctcactgggaaggtgtgatgggtatccgtggtgcctgaccctggtctcttccctttagcggagatgcccgggtatgagggcagcctggctaaggggagggagtcaagaatctctgaatatttgaaacagtctagtagttaagagacgcctgagcagaaaatagagcactttgcagaaaatctctttggactaaggcctgtcacccggacactggctaattaaacaaacaaaaaccataatatgtttattactttagggacctggcaaggagaataaagtccccctgatatctggctaaaatttcccctaaattcccctaaaatttcccctaaaatggaggattacattgatagcttcctggtatttttggtagaaatggactctggttactttaaacaaataaaaacaacagcaaataaatttaccagaggctctaggacagcttgcggaaccatgggaaatcacgcggggaccatggctgggcatctctgtggctccaggcggcatagattgaggggctgtttcttgaagtctttgtcaagactcacactcctgggggagcgatcaggagcctagcaggggagggtggaatctttgcttgcattggggtggagtcaatgtccaggggaaaaacaaggagttgctgcctaaagaaagaggagagaaggaaagcaaccaccagcagaatgtgcccattctgctttgtcccaggtggcttcaagccctgaaataagaaagcagtcgctgaggccaccatgatgccttctttcttctttctttgcttgaagtaggggaatgttccttacaaaaaaaaaaaacaccggaatatggtaaacctcctgcctctcctgacaacctgcagctgccttctggggccctcctctcctttccctgcctgtgcccggcccagctagccctgccacagaactgtttctgggcagaaatactccaagtatccctgtgagataagtgccgtggaaggaggtgcatggatgatgcacatgtactgctcgctcaccgcatgggacctatgactgttgtagcaaatgatcataaacctgacggcctcaaacgacagaaatttcaccagaagtccaaaatcaccaaggtgtctgcaggctgcactccctgcagtggccgtgggggatgagccattgttccttgcccccgccagcttctgacgcactccttggcctgtggtcacatcactctaattgctgtctccctggtcatatcaccttagctttctcatctgtttaatctcccttcacttccctcttattaggacccttgggattacatttaggagctacatggataatccaatattgtctccccatttcaagagcctttatctttttttgttttttgtttttttttttgacggagtcttgctttgttgcccaggctggagtgcagtggcgcatctctgctcactgcaagctccgcctcctgggttcatgccattctcctgcctcagcctcccctgtagctgggactactggctcccacgaccacacccggctaattttttgtattttttttttttagtagagatggggtttcaccatgttagccaggatggtcttgatctcctgacctcatgatccgcccacctcggtctccgaaagtgctgggatttcaggcatgagccaccgcacctggccttcaagagcctttatcttaatcatttctgcaaagtcattgccacataaagtaacattgatagcttccagagactagaacatagacatcttggggggccattactgagcctattacatactgtgtgacctagggcaagtcactttacctctctgagccgtaggtcttttatctgcaattgcctctcaattgcacagggaaggcttacatggggtccaaaaagcaagacttctggaagttgcaaagctccaaatataaacaagagtgatattaatagttgagtaccttcccctctcacctgtcctctctttctgtggatcacctgtgaactgggctgatctcacttctgtttgcttctgtggacctagaaatgatcactgcccccagtgaatatggtgaagaagctggtgatggcccagaagcggggagagacacgagccctttgcctgggtgtaaccatggtggtgtgtgccgtcatcacctactacatcctggtcacgactgtgctgcccctctaccagaaaaggtactgagctctcccggcctgcccaccccccaaccctctcctaagggtctggcatctgtaaggaaccctggccttctactcacccctctccttgaccctcattcaaggcagcagggtcaagacgatgctcattcttaggttctagggttcaagtgcagggaaggtaggatgaactgagccccactggtctgagattctaggacctggtggtaacagacacatgatctaggacgtggtggtaacagacacatgatgcccttctcagaagaaatagcaaagaatcagagcaaaggttccagtgcaagtttgatcccaggaggaatcagagaattgcagatgtttacagctcagctgcataattctctcccctctgaagcctccctgtcaggtgggcatccagcctcctgatgaatacctcaagagacggggagctccttgcctcactgaacatacatttcatgtttgaggttttctgatgtgtctgcattgagccagcatctgcttccctgaagttctgctcaggaatctcagagaatggtccatgcccttgctccatgacatatcaaccacttgagattttaaggaaaagctgtgaattcctaattcgtgttctatttggaacaaagacactcagttcccccagcctgtccttaggataagtctcagacctgtgctctgggcacgttccagcagctgacagcccccttctgactggcaatgggtctcccacaggatacttgggagttgaagcacaactgatttactaatatgttgatgaacctgttagcctctcccgggcctgctgcagcctcactcttcacaacgctgaagcgattccaggctggactcttaatctggtgaagcaccatctagagactgtccccaccatctttcccatcctggctcaactcaaaccccttctacatctgctccttttaggggaaagaacacagctctccaacccactcagacctagcttcaggtcctgcaaggtctcagcaaagtcacttgacctttctgagtttctcttctgcctctgcaaaatgaagacgatatggataagaaagtctcaggtttggctgctcgtcagaatcacatcagggagctttgaaaaaacacccagggcctgggccaaaccacccaagaagttctgattcacttgctctggggtgtagcttggacacgggaatctttttagaagctccccaggttgttgcaagagtagccaaggttgagaaccagtcatatagataatgtctaagaccccatccagcttctacaattcctccctgtgtccggggactgtggggtcatgtgcctttattgctggatgctgaagacaagatgaggatcccagtcctggatccctctagaggctcccaggggataatgggttcaaatgggtgttctgtgtgtcacccagttctgagatgtgtatgtgtgcatgtgtgtggtctcctcagcgtgtggacccaggaatccaagtgccacctgattgagaccaacatcagggaccaggaggagctgaagggcaagaaggtgccccagtacccatgcctgtgggtcaacgtgtcagctgccggcaggtgggctgtgctgtaccacacggaggacactcgggaccagaaccagcaggtactgaactggagggatggggacacatccctttatccctgtcaggtgtgtgagcctgttcctaactgtccctgtccccgaggctgagaaagatcaacccacttgaccaggtctcacagctggaatgagactgagccagccctagctcttctgtgttggagtcacacagacctgggtttgaatctgccgctaactggctgtgtaaacataggcaggccacttagcctctcacctcctcagtttccacccttgtaaagtggaatgctaatgctgcaccttgaagagctgttatcaagtcagagacgctgtatataaagtgccacgcttgatgctgagtggatagtgggcactcaaacaaaagcagtgattagtgttagtactttcattctacaacctcagtcaaatgagggaccaggcccagggccagatcctcaaagtggaatcccggtgactccccaggaaaccagggactcagggctggagtaacctccataaacaaacatttagatggtttttccatccttgcatcccaacatcccaccctccccctccaaaacacaaaactcaccaccatatcctttcctaaagcgatcagttggcccatattctgtctctcttccttccttctttctttccttcttttttccctttcttccctccttctttcttttcttttttttcccctccctccttccctccctctctccctcccttccttccttccttccttccttccttgtttccttctttcctcctctcatttatttattcaacagccattgagcacctcctgtgtcaagcctgtaggactcaagaggagagagctcatgcatgaacagtgcctagcagggaagaattggcaccggggagaagaacagaggaagttacaggggttagaggagggggatgttttccagctgacaatgatgggggtatcagaaaggctcttggtgagattgcaccattgcactccagcctggcaacaagagtgaaactccatctcaaaaaaaaaaaaaaaaaaaagaaaggctcttggattaggcttttaacatcaggcaggcgcaggatgcaaggcatagagaatgaggtgatataggaagcgggtatgcctataggacgaggcatggcggagggaagggctaggtggagacagggatcagagggctgactacagaaaatgacccatgatggggtgtatgcagctggaaaaggctgtcagggcagactaaggtctgttcccagaggcctttgatcaccacaatatggaattaaaatgtgagtgtgtatgtctcaagatatgtcaactttggctatgcattagaaccctgtaagagtcttaaaaaacaaaactagggtccaacactagacatatcaaggtggaatctctggtcagagatccattcatggagctcccaaggtgattctaaggttggaaattattgctgttggcaatgggaatctttagggcatgatcagagtttcagagttgggctgggaagatggagcctacaggtgtgtgggtccagttactagacagaggagccaaggccgcagcaagcactcacgaccaagatgtggcctgcagcaggggagatgctgacagtccggacttgatggctgatgggacgggaaggggcagggtgcctgggatggggcgtggaggctgggggatcttgagagtgctgaaggtcaatgagaagtgggtctgggcagtgcaggatggtcaggtgttctgtcatcgctagtatgactcggccccacccggtggagagaggtctcagggcccactggaggcagctcctacccatgacccctgcctctgcgttggcattcagtagcccttgatttatcccaatgcaagaaacaaattttcaataactggtaacattctccgggagtgatatgggccagagcaggctggttttcaggctgcctccctggtcctgagattgccagctcagaggagcatcccctgaatgaactgtcagcaggatgtgaaggaaggacatgctggagccactgctgtcctctcccctgccgcccaggcttgaccaggtgtggtgctgatagcaggctgcaggagctgggaggaagcagtggaaatgcccttcgtgtttttgccaagcagctgggttgtgggctagctgctccttccgcctatgtccatcataggggttcaagtggctggggctccaggctagctgggtgtcctctggaatcactgtgaagggccaagaagactctcatcccaccctccaactctgaaggtaggggccatagtctgccctcagcttttcctgtgagtcttagcctggagcaggtgagttctaaattccctcccattgtctgtcctggggaccttacactgcagggcttgggaaaaagctggttggtttcagatcattcagataactcaggcttagctggacccaggacaggagagaaaggatgcattcaggccccggcttctgggtttggccatgaagagtgaattcctgcccagtgtcttgccaaacaggcccagcataaaagatccagaggaaccctgagcaggcagaggatacactaggcccaggatggacagaagcctctacttcagagctcatccatagacctctttttaagaaggtaaagaaggagctgttgttgcaatttcatagataagtcaaaacatattattattaataatagcatcttccacttttttgagttcttatcgtgtgctgggcttctgtgctcagtgctttacatgcatcatctcatttaatccccatgacagttctcctaggcaggtagcctcacaaacccattttacaaggcccagtgaggttgtggcagttgccaaggtcacacagctcagaactcaggcctgtctgactccatagccacactgctatttaaggagctaggttagccaaggtcacagtcagaggcattggagagactcaggccaggccccctcaccgtcagctcaggatgctggattatatgctactgaggacctggcagtgtccaacagctctgaatgccagattcctgaggagccagcgtctccccagcctcagctactccctggctggctggggccctagatctgagtgcagcatctgcatttcccaggctgtgagaactacagtgcaaccctcctctgtgttgctggagtgaatgccctcagggcaggcagcttccagggtggcacctcatataaatccagggagtggccgaggcctgcaaggaatctggctcaacacctgccatttgggtctcagttttacacattttgatcttgcacatgatttcactagggcaaaattaagtgcatgaaggaatcacacattcctgggtctcgccctcagtgatgcagagtgggtagggacctgggctatgggggccctgtaggtattctgctgcagatgggggcaccacacttgcagctcagaacagagataaaaccagataaaactccgctttatgactgctttgcatcactttccagctggcctcatctgaacagggcagaaagttcctaataacaataatcaacgtcagaattaaatgtgtgtcatgctctgctggcacaaaactcttttcaatgcattctttctttcctttggatcccagtgtcaaatacccgcttgccaacatagtttgtttgctgtacacaggttgaaactgcaaaggttttcaattttaaatttagctaatattttactttttttttttttttgaaatgggatctcgctttgttgccttacctggagtgtagttgcgagatcatagctcactgcagcctccaactcctgggctcaggtgatcctcccacctcagtctcctgtgtagctgggactacaggtacaccaccatgcccacctggataatttttaactttttttgtagagataaagtcttgctatgttgcctaggctagtctcgaactcctgggctcaagggatccttccccttcggcttcccaaagtgttaggattacaggtgtgatctggtttctaacttctcttaaagtgttggaggtctggctattatagatcttctggatggcctgacatccattgcctggagggagtggtgactgcctgtctggaggcagctggctctctccctattgacaggccctgccacaccctggcaattcttcctggcaccaaggcaagagtcagtgggcacctgtcatctcattgctttgcctgcttcaccctctgacaataccttcatgagccctgtaggcaattgagcacatgatctcgatttcaaatacacagcccacttggcctgtgtccctccctggtttccttagatagctctgtgtgaagtccttctttcataatatcctttgaaaccgatattcacccatttaagtgatgaagcttcagggctcagaaagagtgagaaatttgccaaaaattctacagccaatccaagcagagccaggactccaaggtaggacctgcgcccaggtgtgtagcctgtaccccgagcagctccagcaccgccatccacacacaagacacaaatgagagcgtgctctccagacctgtacagcgcatggcctgccaagctttagaccaaagccccgactccaatccaggggcccgactacaaagctggtatttttctttactccatatcaagcccttggctaagaaatggggatttccaagcccacagctgctcttgtttctccccacagtgctcctacatcccaggcagcgtggacaattaccagacggcccgggccgacgtggagaaggtcagagccaaattccaagagcagcaggtcttctactgcttctccgcacctcgggggaacgaaaccagcgtcctattccagcgcctctacgggccccaggccctcctcttctccctcttctggcccaccttcctgctgaccggtggcctcctcattatcgccatggtgaagagcaaccagtacctgtccatcctggcggcccagaagtagagccatccatccatgccataccacttgtcagggcacaggggactggctgggcccccagggctgctccccacttgcagcacaatgccttctccacctgccctcccactcttccagtccaatccacgctgtcttctgttgcaggactaacctttgagaaatccttttgtgaagtcattgcctgctcaagaatgtacagtggctccccaatgccttggaggccataaggccagccagttctagctctctattacctgtccccactcaactgactcatacctgtttccggctgcatcactatgtgccccacagagaacgatgatcgtcacctctgtgcctgagttctccctgttgtctcaaagcggtacccatcctcccccagaagctgtccccagcgagcctcccttctttgtttgaattctctaataagagcaacagcagctcccatttctagaacacatttacagtattactattttctaggatataaagtgccatatatatttttaattccaatattaataaatgtatgccaaacaacaatcagctgcaaggaaacacatgagaactcatcaaaattttagcggtgggatggtggttaatttctgttttcttccttatcccctttttatttttgctgcttttctaaatttttgattataggaagggtgtgtttcgtttgcttttaatcagaaaagccatggtagatgccattttggaaaagttgaaagagtgtgtccccctcacagaaaaagatggaagtgggtctggggacggagttgggttccagtcagagacaggccattcagaacacacaatcttaaaaacccctctgggccgggcgcggtggctcactcctgtaatcccagcactttgggaggccgaggctggtggatcacgaggtcaggagatcaagaccatcctggctaacatggtgaaaccccgtctctactaaaaatacaaaaaattagccaggcgtggtggtgggcacctgtggtcccagctactcaggaggctgaggcaggagaatggcgtgaacccggggttcggagcttgcagtgagccgagattgtgccactgcactccagcctggtgatagaacaagactccgtctcaaaaaaaaaacaaaaaacaaaaaatgaaaaacaaccctctggaggaaaggtcatgatatagaggaggatttgttatttaaattgagggtatggactctggcactgagcctgctggggaagcctatctcagatttgaaaagggcaaaatgggaagaagccatcacctttaccattcccactccaggaagttttcctagaacgatgactgtccaagtgtggtccctgggccagcagcatcaggatcctgtggcagcttgtgagaaatgcacactctcaggcccctgtcccagccccaccacgccagaagccctgcacggggtgggggtagcaatgttctgtgttctaacaatgcgtaggggattctgtggcacacctcgagccagagaactaccggtgtaggaagtgagcgtcctgtcgcgaggattttcagagcaggtgagtgaccattcggcagggccagtcctgagctgggtgtgaagttaggctggtgtctgaagtttcttccagtgttgtgagtccaagatgcagatcttgggtttgaatcctgtctctactctgcccgatttcatctctttgattcttagttttttcatctataaaagaaggactctttctggatagttgggagggctgaaggaatgtttgacacatcataggtgtttaaaatggcaactatagttttttttgtttgttttgtgtgtgtgtttttttcttaactttcattttaagttgcagggtacacgttcaggtttgttacataggtacacttgtgtcaagggagtttgttgtgcagattatttcatcacccaggtattaagtctagtacccattattaaagaaaatgtggtacgtatacgtcatggaatattatgcagccataaaaaggaaggagatcatgtcctttgcagggacatggatggagctggaggccaaatattatccttagcaaactaacacagggacacaaaactaaatactgtatattctcacttataagtgggagctaaatgatgaaaacacatggacacaaagaggggaacaacacacactgaggcctattggagggcgggaggtaggaggagggagaggatcagggaaaaagagctattgttagtaacaagaaaaagtcggccgggcgtggtggctcacacctgtaatcccagcactttgggaggccgaggtgggcagatcacgaggtcaggagatcgagaccatcctggctaacacggtgaaaccctgtctctactaaaaaatagaaaaaatcatagccgggcgtggtggtagccgcctgtagtcccagctgctcaggaggctgaggcagaagaatggcgtgaacccgggaggcggagcttgcagtgagccgagatcgcgccacggcactccagcctgggtaacagagcaagactctgtctcaaaaaaaaaaaaaaaaa

SEQ ID NO: 171 - DNA, 26554 bp, Human
attattcctcattatttctttaagtatcttaggctcctaggaggaatatttgagaatgtgctttttttttatctcgctgggaattgcaagtggtaattgaaggtagcatgtagaagaaatcagtatgcatgaataaggcagtgcaattcgtaaataaagcaagtgaaaatggagagaaaagataagattgaccaaataggaatttattaggttgagtaaaagacatacttatctatgagagaggaaacaagagttgagtgtgcctcagtggcacagatgtttcattcagtcatgtaagtcacttcctttgctacagcaaagagaagggcaaagagccatccaagagcagctgttaacaaagggaagcctttttgagactcaggtgtgaccatgagtggagtacagtgtcccattcactttgtgtttgcgtttctctgtctttctgagattttctgagttggaactccgaagtcaaaccaccttgcatttgtataccttttcttctctcagggagaattagctttgaataataaaaattgccaaatattggtgtaaaatatttcactttagagaaaacattcattctttccatttcttaattataaagtaggagagtgaggcagcatcttcctgttcatatcaaaatctcatgtggctttctgtgacctacttggctctcgatatatgtgtgttgtgtatgtctgtgtttattttttttccagcaaggtagcatttttttccttgcaacttgccttaagtctaaccccaggcttgttagcagacttgaagttctttttgctgaatggtattcaccccgcctcctaaatagaaaatgtattgtaaactaaaatgctccattgtaagcgtaaactcatttgaactccagcctgcccttcttcaaagttccttggactctggagccacttgacaatggttcttcctcggcacaaacggatgagtagggcttacttgggggaaaactcaacagaggaaactactacgcttcacggactctcccacagtggtttctgatgaaatgttctgccctcctatagaaaagcagaaagagcaacagctgatggctgttcctctttcttcctttttatttatttaattagttagctgctgaagcttggctgagtttcaatccctcagtctcataaccctcccttatgttgtgctctatataaaatggtcggctggcactgtgatatttagtgttactgttcacttaggtttctgttgcagaaccatattttagacagaatgtattagttatgcttacaagaatgtattatacctacattagccatggtttactaggttaatgaactgtggcgacaaagaatcactgccgttaagttgtagagttgctctaggtccctgcattcggctgtcgtatttcactgaacttactttgaagttgcttatgtcactctcaccattgccccatatttcctgtcatcccatctttttttttttttttcttctaagttgcttaattccttggctccaagggtagattctcttgattggacaaagacccctgagctgcttgcatcctctgcaatgttctttgcagacaaatgctaccaaggctattccgtgattcctcagtctcactttgttaattttccataaagcagcccatacaatccccttgaaaatgcaagctttggtaataatgcctagttccgtgcaggccaggggtgatgcattcatgttttctgggaagcaggatttgttagcattggtgtttgaaatacaaaagatcacagcctcctgctcagcactgtagatccatcttttcttggtgacagaggcttaggggatgagtcagtttttcaggccttgtcatgaaattagtttccttcttcttcactcagtttgaacccttgtctgaaatcttggaaaaattagaaacatgtgtcttcgcatttaagaacattatctctgtctcttttctttctctctcttttttttttttttttaatttttgccttaggcctaactccacccaccactcctcctcataaagccaaccaagataacccttttagggcttctccaaagctgaagtcctcttgcaagactgtggtgccaccaccatcaaagaagcccaggtacagtgagtcttctggtacacaaggcaataactccaccaagaaagggccggagcaatccgagttgtatgcacaactcagcaagtcctcagtcctcactggtggacacgaggaaaggaagaccaagcggcccagtctgcggctgtttggtgaccatgactattgccagtcaattaattccaaaacggaaatactcattaatatatcacaggagctccaagactctagacaactagaaaataaagatgtctcctctgattggcaggggcagatttgttcttccacagattcagaccagtgctacctgagagagactttggaggcaagcaagcaggtctctccttgcagcacaagaaaacagctccaagaccaggaaatccgagccgagctgaacaagcacttcggtcatcccagtcaagctgtttttgacgacgaagcagacaagaccggtgaactgagggacagtgatttcagtaatgaacaattctccaaactacctatgtttataaattcaggactagccatggatggcctgtttgatgacagcgaagatgaaagtgataaactgagctacccttgggatggcacacaatcctattcattgttcaatgtgtctccttcttgttcttcttttaactctccatgtagagattctgtgtcaccacccaaatccttattttctcaaagaccccaaaggatgcgctctcgttcaaggtccttttctcgacacaggtcgtgttcccgatcaccatattccaggtcaagatcaaggtctccaggcagtagatcctcttcaaggtaaaccttggcaaaaccctaataacacaaaaggtgttcctaagaagtaaaaaataaaataaaatacaaataaaaatttgaaatctgcagccattctggcccctgaccactgcaattctggcactgctggaactaacgagaacattgttacactcacatctctctccatgttctcttaaatctgtcagctctgagcacagtgccttgagccagtcctatcagagagagcaatttgttaagaaacttgctcatccaactttttccattacctggagagctgccctgtgccaggatagtggagatccatgcaagataaagctgacagtgtaccagacctggtgctcagtgttaacatcaataagagacgctgagagagagcacatcactcccagccctctaagttgactagatgatcacaaactgtcactgggaaatctccctagtagctgggaagaaaaagccagtctctgtaatacagtgtcccagaggatgctccacagtgccgataaacttgggttaagtggcagttgcaaatgccctttttgcttttctcctctggcgcagatcctgctattactatgagtcaagccactacagacaccgcacgcaccgaaattctcccttgtatgtgagatcacgttcaagatcgccctacagccgtcggcccaggtaatgaggcatgtcattttcctttagctccctttatcccctccttgagatgacaagatgttctccaaaaccctatacccctccccatattattattcattttgctcatgaaaattgaggtggttgacttagtgataaagttatgtttcccaggtatgacagctacgaggaatatcagcacgagaggctgaagagggaagaatatcgcagagagtatgagaagcgagagtctgagagggccaagcaaagggagaggcagaggcagaaggcaattgtaagtggcctggagctcacttttattttaaagtagggtttcttctttttctgtgtgctttttttggtgatagattagaaaataaacaaaagctaagtctttgttagaacaggccattttcagccttttggctttaaaatatccataagtcttcggtccccattgacctaacttattggaaaacaaaatgtttaagtcagtatatttctcactcacagtttcattttgaagttcattactgttttcaccttctgttttgaaaaatggagggagtagagatttttttttcagtcagatatttgttctttctgatcacaggataagtttttctttctgtttcctgttacttctctctttgagcggaaaatgaggagggattgctatctcgtttcagtttttgtctttttggccggcaggagacttaaattgtccatgaagagactgagttcaagttggatttaaaggagcagtggaggaagagttgctaagaaagtcatcatttctggccaggcacgatggctcatgcctgtaatcccagcactttgggaggccaaggcatgtggatcacttaaggccagaagtttgagaccagcctggccaacataggaaacaggaaatgacataggagacaggaaaccctgtctctactaaaaatacaaaaattagccaggcgtggtggtgcatgcctgtaataccagctactagggaggctgaggcaggagaattgcttgaaccagggaggtggaggttgcaatgagctgagatcgcaccacggaactccagcctgggtgacagagtgagactctgtctcaaaaaaaaaaaaaaaaaaaaagtcatttcttctgcgtgatggtcgtcatctaactgggtaattgacacacccacatttcttatgaactacttttcaatgacattttatggatttcagcaccacttaccagggggtattatattaacttgacatatagacagtgctgacccttctgtgtaaagatccacgttatgttatatttgtttgctgtctgaagatcagtcctcattttcagcagctgctgactagtgggtaggctttaccccaactccctaccgctgtttatcaacctagactttggatggcaaaaataagtcagtccagttgtcaaaatccagcccatgcccatggcagacattcctaatcgataatggaactctttcccattgagccccctcagagccttacggtcttttctgacatgatgctctagggagccatgactaatcaatgagatatagcactgcttttattcagtgcagctgctccctgtgtgctagccactcagagttagctcagtgaagatcagcttttgacatatcttgcatctaagctagccaaggcttagggaaatgatttttgactgtaaaggttagatttatgtgttatctttaaaaaaactcactaacatcaacacaattttgcaaaagctatataaaagagctgactaatggaatcaaaatcaagcattggccaacagttaccagctggaggaaaaaggttaaatgagagatttgttcaacacaggcacttaaggagaaataagtgagaagtaactgaacacttaggtcaaagttttggagggtttgctgccatttaactttgaatctacctaagactgactcaaaggcattttgcaaattacaacaatttgcctcatttttctcaacttccaaatgagcagtgatattaagatttgccaaagtgtcattagttaacacttacgaagactaatgaaaattaaaattcaatttttctaatatcactgtatttaattaatggcctattcaataattataataactcacatttatatagtgccatataatttacaaagccttttaatatggcacattataatcattacaaaagaaaatcatgctgagcgaacatgtaggaaaatgattattttggtgtttgcaaatttatattttataaaatccttcatttttcccccaaaaataggacattaaagagaaagattaatagtttcatcataaatttgcttatatggccatgacacaacacagttgtaactaaagccagattaatattttaatcaaaagcatgtaaataaatgatgtgtttattttatgccttctaaagatgattaagtgccagatattaataaagaaaggaagggaggtgtcttttttgttgctagttcggccctttacagatagagcaagtagtgtcattggtctagatgacacaaaatcaccctgagggtcaccagcctcagcttggaagcagatgctaccctgttgtccctttgtgttacaaatgttgactagttcctctgttaattcttagatgaaagtaatctgtatcagttctcttccaaagagcacttgtaatacaagtgtcaacttgatttttattaaatcattttacattaactagacatttgtgagaattttggctttaaaattcgcttttgtttttgaaaagtagattgaaggaaacctagaacatagagattgtttaccaacagagtggactataagtgataagtgcttaataaagatttgggacttactgtttaaccaatttccacttggacaattacatgctgtttctattgaacatgagtgaaagctcatagctctttctgtaataaatatttgccatttggttgggatataaaattaggaaagacatcgtccctgtatccaaggagcttcaaccatactggcagataaaaatacacaaacaggcaatacagtgtgataagtgctattataaggggtgcatctgtggcactgttggggtggtatattgggggcatccagatctatatatgaaggagaacatcctcagagagggtataagactgatccaaatcctaaagggagaaaggacaaagattttctccacctgcagcatccaatatggtagcctttagccacacggttaatttgattgggccatattaagatgcactgtgtgattggatttagaagacttagtataaaaaaatagtgtaaaatacttcatttatctttttatatcaatcacaaattgatataatagtttggacatgttgagaccaatacaatatattattaacattgaatttttcatatttttactttttaaaatgtggctcttagaaaattttacatgacatactgcattgtatgattactggacattgcttttttagacagcggctatagcttatactaagtctctaaaaaagaataaggtatattgagaaactactagtcgtttaattggaacactgagacacaagaggggcaagaaataagtctagagggaatggtggaagatagcctaaagggtcctataattcatgctaaagattttgaaagctatcttgaaggcatcatggaactatttaatgagtttacctacatgaattttttttattgattcccttcctccaaatagttagctttctagtaccataatgcatccccaaagtatatttttatggacttgagtgcagggatacatgcaatgatttttaactgatttgaaaaaattagcttgaaaattcatacatagaagagctaagggaacaaggacagtccagacttaagttggtcaggtacatgatgttctttcaatgtttgaaacaaccttaaagtaatgagtaagaagcaaattacatttaagatatcttggggtcagtgttgggttgttcattaatcaaagcaatcatatatttagggaaccagaaaaacagagactccaaaaggcaatgaaaaaaaaaaccttcagaaatttaataattgttattttacaaaattaaagtcatctttttaacctttgtctgcattacttctattttgagttccataagtaggaggtgttttaggagatctataaacttttcattgcttatgtttctaaaatcctaattcagcccaagttgagtgagccaaatccaaaaacaaagagaacactaataattagtaattaccaatgcaaaatcttatattgtggttgaatgttaccattgtttcagttggcactttcctgtaatttccatcctgactctttctcaaaaagcaattcactttctgcctttctcagactcgtaagcttgaaataattcaggttatattgggactctgcaaaccagagtttagtacttagtgtctaaactgtcactgctctaatttcttgtggagttctaagtccaactccatttgcaatctgtacagttttctgccagaaaacatgataatgggatgttaatttaaagggcaaatctagacattgtgatatggctcagcactcaaaaccaaaactagatgtgctcaggcggcaatgactgctgcttcacttctctgttggtcagtgtccagctcagaagccagggacagtgtagtactgctgataattataaacttcttccaaatgaaatgaaaaaaattgtgcaattactcagggttttttttttttttttttgagatggagtcttgctctgtctcccaggctggaatgcagtggcgcaatcttggctcactgcaagctccgcctcctgggttcacgccattcttctgcctcagcctcccgagtagctgggactacaggtatccaccaccacgcccggctaattttttgtatttttagtagagacggggtttcaccgtgttggccaggctggtctcaatctcctgacctcgtgatctgcccacctcggcctcccaaagtgctcagagttattcttttttggagaaaatgaaatagctttctatgcaagcctctttaaagagatattttgtgtgggtgagtatatgttatattgtgactctaagttcaatatttagaaatattcagttttatggaaagatgaataattatagagatctgctatacaacatagtacctatagttaattatgctattgtacactttaaaatgttgagaggatagatttcatgttattcacacacacacacatacacacacacacacacacaaaagaaaaaaacacaacacaaggaaattttggaggtgatggatacatatagtaccatgattgtgatgatggtatcaaggatataggcatatgtccaaacccatcaaaatgtatatgtttaatatgtacagttttttgatatatcaattatgcttcagtgaagcttttttaaaaagtagttatgcatactcttattctataattttcatgttttctgacttaccagtatgtttacttgcatgttagcttttatttgcatcttaccttttaaatagactaacctggacttattcacattaaccagacttagacactaagcagggatagtagcacacggtacgtgaatgggggacactttggacaaatttaatgctacaattttgttttttctctaagaacaccccctagtagtaggcatttattgactacctaatgaattaggttagataatcaatattaacggcaagaaagaaaaacacttctcagcattttttagaatcttggtatatctttctatctgtacctttccatgaccctccactccactcacctcttcttttagttggaatacaccatacactcaatttataatatctttgcaatttttgaggcagtcaggttacagctaatctaggaatgaacactagtatttcactgccaaagttgatatgtagtttccttagcatagaaaaaaagatttttacattattctgacttgcaaacgtagagagctgaaatctacattatatcaagctcttccttgttacctaccttaaaggacattttagagagatcacccattaaaagcattaaatgcagtacttggcatagctaagagttcaacaaatgttcatctctctactaccttctgtcttttctttgtcaaaccccttttatcaggagtagtttatttgatgagaaacaaccactgtatgttttcctccagtaactgggaagctctagactctttttgataaagattttagtaatgtgaagtcagttaattcagtcagtttcttgtttctttatttatcccccacgttttggtgtagtgaggatttactatagatgttaatgcaatgtaagtcttcaattttattatccaccccatcagcgtactagcttttatgaaaactgaagctaaaagttatttgataaatgtaccatcctcctcaatagtgaaaactggtccgaaaatcatttttcgaggagctgtttccaaaggtttagagttcctccaagcctttaagaagttgaaaatgtcattaagcattttgatttcttttcctttcatctcctgtttagaaattaatgtcttgaaaaattggctgcaaatgttaagcttttttaaagatatgaaatctattcatctgtctaatacaactgcaacatgtttaaaagaatcagttctttgctagacattttggccaatcttagaaagatttttgtctttgctttctaggcatttggatgccttttattttcatttttagcagtaggaaaatcaagcacttcaataattttctcaaataagcctttcaacatgtattcaatctctgatctttgtaaggtagtgaggcatggccccattcctgtgtttcataaaaagagatggtagaaaaataggtaattcaagtaattgtggaacaccccttcggtttcctgtttctcccctctaggttatatcttctttttactgtagaatgtatcagtatccattataaaaggtcctctggtttatattttgtatgggatcgttgttgcatacaacttcgtataaagctgcaattcagagactgtcccagtatgtctgcatatgggcatacatatggtcgattttcgctttaacttcaaatttccttgaatacataggctgtgtttattcccataatggtagttgagcaatttctttgcaatgtctcaatttctttctctcacttctgcacttccccctcctctctatacagtagtaacttttctaaaaggctcattaaaaaaaaattccttaacacccgtgaaagcaggcgccaggaaatttaagtttagatagcagtcccatcacatttggctgtttgactagagctggctgcataaacagaatggaatgtggtgttatgattcccttgctcaagtgtgtatcgatggtctgggatgtgcctcttcatccatttctactttctgactgccaggatgtgctcggtgctctgaagtggcacaatcacagccttcaattgagacatacaatctacatggaagggcgtcaggcagcctgcactggttactctgcttcatctggtcatttatttagtctcaatgctattgttcgtagagttctgttttaccaactgtttgttatctcctacctttgattttcagaggtgatgtttatgagtgagattcctgcaaacatgtagctacttcttacacttaaatctgtaaaaacaaattatggaaatctttgtttcttcactcagctgagctacttgagcaaggtttttttttttttctgtgataaaacaccaaatctaactttccttctcctttgtattggagagtctcagagaagaaggaccactcttagtcatctttgatgtaatgaagggaatgggataagtgttcaagatgattaattgattagtaactgattgattttatagcagatattcattgatagtctgttatgttttgatgctttgtttaaaatacagtagtgaatagaacagatatggtctctactgtcatgaagcttttattatcctggggaagtggacattaaacagtagataaactattaattacaattggaaaggagagttttccataagagcaactaataggaattctgacctcactgcaagtctcagaaaaaatgtgattgttgagcttaaggttgttgtagacagtgtgtgtatgtgagaggcttgggagtggtgcagtgtgaatagggtgtcccagtagcagggaaagagcatgtgcaaaggctttgggaaggaaggtgcacagtatatactagactaatagaagctcagtgtggctggaaaagagagtcacagaaagaatgcgatataagagataaagcccatgatgacaacaggcccagaccatacagggccttgtaggtcttgttaatgatttaggtctttcattaaaagttatgagaagccattggaatattttagaagttaatggacgtcattggattcctgtttccttagcaaagactatcctaacaacaatggaagaatagattggagaagaataaacatggacacagatccaagttaggagattgtttgttatactagtccagaaagagaagctggaggcttggcttaggacaatggaataaagaaaatagattacagagagatttaggggataaaaattaataggacttgagtggttagacatgtggagaggaacaagagaaaggagtaaagggaggtagttaaatttctgtcctaaataactggctagatggtgttcatttcactaatacaagaacattgggaaagaaccaaatggggagagggcaaggctggagggtcgggcttcggtaatgttggtgtagtgtgaggttcctcaggcacaaccaacctgagatgtcaagtagacagttgattatttgcacctgaggctcagatgaacttactttcctaataaaaaatagaggcgagcatgttacatgtggtagaataagaccagacattggtaagcttatcatccaggaagataaagggtctgcaaattgttcagttacatttcacaaatgcttgtcgggtgcctactccttaccagattcttggccaaatactgggcataagaaaaggaaaaccattcagtaaataagaaagggcatctttttgctttcagcccaaattactcttttcatcacccaagaccagggactctcagtacatccaaagaaaactcttgggcaagctaagtctgtacctcagttctctgcttctagtctttgcttcaacctagcttaaatctctgcaaccttaaattcattttatcattgtttgtccttagtatacatacaaactagttggtgagcacattctttatattaactccttatgttcttaaaactttgagagacatcataacttttggccttatcttcttggaacaagaggtataggattgcttcttacactaagaatgcatttctgtgctgtaaaaaaagaatttatcctcaggctataaaatattattcctgtattttgtaggttataaattactgatgactttcagactatgatgatattgactccacttgtgaaaattaggccacacccctctagtctgttcctaaaataagactagatttattggcaaagtgaaatttatagcctcttttatttagctcttattcttcggagactcatggcttaaaatggcctacattttaagactgtatttcttaaattattgtctttggaccacctgcatcaaaatagctgaggtgtgcttgttaaaaatgaaggttgtagaaccttatcttacatttttttttagtacaactagataaagcccaatcatttgcatttttaatcagcaccccaagtaatttttatgtatagtagagtttaagaaccactcttttgaggacgtcagagtttgttcatctcagtattagaattctgagttaatgagaaatgtaatagttttgtaagccaggtcagtttcataacaattttgattcataatcaagtcacaaatgttcaaatatttaataggtattgttccatgatttgaaaaaagaatgcactatacagatttcttttctaacacatcaagttcatctgagagtagaacagagacagataggaaaggtagaaaagagtagaggtgaagagaagaatctatgtgagcaagaagagattgatactgaagaaatgggaattaatacttggttcaaatgtagtctttccttccattgtagtgtatgttttgctctaattgccatgctcagtggggtttcttatgcatgattgtacatttatgaatgtttctagagggttagctttttttttttttttttttttttttgagatggagtctcgctctctcgcccatgctgaagtgcagtggcacaatctcagctcactgcaacctctgcctcccgggttcaagcaattctctgcgtcagcctcctgagtagctgggattgcaggtgcccaccaccacacctggccaatttttgtatttttagtagagatggggtttcaccatcttgcccaggctggtattgaactcctgacctcatgatccacctgcctcggcctcccaaagtgctgggattacaggtgtgagccactgtgcccggccgagggctagcttttttcccactccagaactctctccttccttccccccataggaagagcgccgtgtgatttatgtcggtaaaatcagacctgacacaacacggacagaactgagggaccgttttgaagtttttggtgaaattgaggagtgcacagtaaatctgcgggatgatgggtgagaatcttcaagattatttcttgtttagaagctgacgtatgtaaaaaattatggccataagattactgggatgggagttgccaatgtaagtgctttgacagatgacatgttgagttcagaaccttatttattttctttcatccctgtttattaatctttctagttgagatttcctgtcccagaaataagtatttagctgcttgacaggacaatcacactgataaatggattcagtggctcagacgttggcactggagaagtctcacaaagtagaaagggttacagtcccatatactaatacttcttaaccagctttgaacttttctttgtccgttgcagagacagctatggtttcattacctaccgttatacctgtgatgcttttgctgctcttgaaaatggatacactttgcgcaggtcaaacgaaactgactttgagctgtacttttgtggacgcaagcaatttttcaagtctaactatgcagacctaggtatggattttattgtacgtggaatgaggaatccataatgtagagctcaagatgggaacaaacataatccgtaggcaccttgggttgaaccatcactttattttactaaagggaatgtttgaatacagatttttaagaaaaacgtataagacagtttcagaagaaaggggcctaggttttggcaagaaaggacagaagtaaattctttgtactatctactcaggtgctgaaaattgtggtaggtatgtatgtggatattgtgtgtttccacatgtgttcatgatttctgtatgtgtgttgtgtgtgcatgcagctttatattttgtgagtgcatgtattgtgtgtatctctgtggatattgtgtgtgtctgtgtgtgttgtgtgaatattaaacatgtatgtgtgtagtattgtgctttgtgtgtgcgtgtgttatgcagatgtgtgtggctatcatgtgtctttgtgtgtgtatgtatgcaggtattgtatgtgtctacatgtgtttatgattcatgtgtgtgtgtgtgtgtgtgtgtttgtaacctgattttgccttccaggcctaccctgaatcctttcacgaaccatagcattgccatcattgttttatggaacagaatatgcaagtctcattttctcttattatttcacagacacttagaaatatcatcattttctatgaactacaactaagagagaagaaaattaaatttcatatactaaatcacactctgctttctttaaaaaaaaaaaaaaaaagaaagaaacacctgttatttgttgagtgcttccatatgccagacactgtgccaggagctttgaaagcattttccatttaattactagaactatcctaggaggtgtatattattactatcatccccattttacagataaggaaactgaagcatacataatattaatttttcctgttataaaagctgtacagactcaaggggtaaaatatggtaaatataaaaaggtattaagaaaaaaattaaaatcatgtatcagcctgtcatccaggaataaccactattaccaacgaagtgatttgccttccagtattttgtctcagcatgtctaatttcttacagttgaatttatatatatatttatttatatatatataaacttccaaattctacttttctcaattaatatataaattcgtgttctgctgtgactcacaagattaaaaataatttattaacatactttaatggttgtacagtattttgctgagtgaatagtaccattatatttagtcattacattatagccaaacatttaatttttaatttttcaatattataaataatgctaaaatggacatcttaatttcctttccaattttaattttgttcctttgcatgtcattccccatctaatgtgtgcatagtaagcctttaaattctttgaggaaggaaagtgacaagtgtcttgtgcatatgacataattatattaaatttatttgtaatatttatcatgaaattaacatataaatctagtcctcatcattattagatatctatatgcactttctctgggttggtaaaaagaaggaaacaaatacaaatacagggattttttttcttctgtccaacgaagggatgtcttcctagagtaattgatacaggtgatgtgcattgttcacagggaatatgctataattcactccacaagctaaatagatagtaggaagcagtggagaggcagctgactgttagagagatagcaggctagggatgaaaatatagaatgtggcaagtcatttgttcaaatgttggctgataaaaacagtcaagacggattgaagtcttgagttgatttgacttattttcttcagtgatgaaggccagggtgtttctagtctctcaaaacatctagagtttaaaataagctacctagaggggcctttagatcacgattcatcactggtagagagggaggattggatggtatttccaaattgaactggagcctccttgaaatatttctaagaaggatgcttcctctctcgttatctccctgcctagccggcagcaatagaaactttgccattgctaagctcgctctgtattttctgaaaagtatgtttgatgtgcattgtagtaggatggatttttccaattccctcaagctgtacgatggcacaaaggtagtttttttctgagctccatcattgtatagtctgaagaggccaggctttggaatcccgcagacctgggattgaaatctgacttaccactgccgttgggcaaagaattcaaccccttcagttctgcttcttcatttgtaaaataccatatagtgttattgtgaagattaaataaatgtttgtgatgctattagcacgtgtctggcataacataggtgctcaataaatagtggctatggttataatttaaaatgatgggaatgagaagttagaagtgtaaagtcgttttaaaatggaagaatcgactctaggaatcagctttggaactcaaaacatttttcctgtgtcttgtctttgttccctgaagaattcaaatattcttgtgctcaccatattcagtgttcatgcacatttcagggcataagaatatactggactcaggggttaggagcatacacatatgtcacaatagtaaagcaaaaatgatgtgacacagattagttttaccaagacaggaaagttacttatcattctagatagatttaaccaattttctttctgtttacttgctcccccaaattaagttagcttatacatcctatttctctactactgaaactagataatggtgactacaatattgttagagcaaaacataacgatttcagctactatttatgacccagtattataaatgagagtgagagattaaaatgacttgatcaaggttaaaacagtgaagcccagatttaagttctagttgccatgaatcagtagtctgtgtgtctttctatttactgtcttataagcaaatggatctttctaaagacctcaacgaaaaaaaatcagaggggaaagaccaagagaaattaaagtaggactacaggatccaaacagaaagatgggtcagtattatgaatgtaatagttttgattaggaattagttatgttacataacttaaacatttaaaaaaataaatgacacatacattataaattattcattaactgaaatgaatgtattgtattatcagtattcttgattatacacgtaactttatgtatttctttgccattcattgataaatcgttcccacatcccaatataaatattttcaaccatggttttaataatattttggtgtttgagattagtatattccttcaacaaatattaatttgagtgcctcctttgtgccaacagttttccaggtgctgggaatataagtgtgatgtgatttgtttcaaataatacagtatcattatttctaacaatttattttgaaaaattagagtggcttgagttattactattttcatgcgtgtccatgtgaagagaccaccaaacaggctttgtgtgagcagtaaagctgtttatttcacctgggtgcaggcgggctgagtctgaaaagagagtcagagaagggagatggggtggggccgttgtataagatttgggtaggtaaaggaaaaaggggggttgttctctggtgggcaggagtgggggtcacaaggtacccagttggggagcttttgagccaggatgagccaggagaaggaatttcacaagacaatgtcatcagttaaggcaggaacaggccattttcacttctttcgttgtggaatgtcatcagttaaggcaggaaccggccatctggatgtgtacgtgcaggtcacagaggatatgatggcttagcttgggctcagaggcctgacacctataacatttttattatatcttactgtgctccaatatcctttcattagcgggagagaaattggtggagtagatgttattgcctcagaaattaaatgtaaccacattctatctcatgcaacaaaaaatatttttggttgttttctgagtaacagtgtgcctgtataagtgggtatatatgtgaacactatatttcacagtgaagaaactcttgagaactactatttcacaatttttttaaatatttgctaataaaatacagaaacactgaaattctagagtttgcttagaatattgcaaagtaaggaaatttaaaatattctcaaagagttcctcaaggaaaggtatgtgtgtatgtccctgatggttccaggctgacttttatcacacagactccatcactgggggaatcttccctcttgatctacaatgcaagtggaattctgatttcagactaatctctagcaatgagctagacatttttttttttgtctctacaaaaaagattttgatttgaacagcagttgtttgtgaggccttagcaatacaagaaaaccattcattagcctatgaagagaagcgttgaagccagtgtaatttaagaattgactatttaagatgctattgaggaaagattggccagttttgtctccgttttttatgattgagactgtaattgttctcgttgctcttaccttaaaaaacttgctgaaaaaaactcagtaaagaccaaaggtgatcagaatgaaaggaaaacataaataaagacatttctttgtctttaaatctaggtatgtaaaggtagattgaaactttggaaatgggatggtcaggccggagctagagagcttggtttgcaatcttgtcagcaaaacaacattttaggtcaacgattatgcctctgtagtatctagtattatatccttctattactttgaccatttcgattttgtaatttactctgggaaaaagcatgggaattcttgtattttggtagaattgttagttttccagaatggttttgttttccttcaaataaatgttttcaaaagaattaacgtatttataagaggctttttattatatttccaagcccccctttgttacttgcaagaccagcagaaatatctagctttttcatagaagtcaatggagaaaaaccaggaatatttaacagaattttactttgctttctatattgctaaaacatatctattttgttaaggtctatttgaagtagcagtgaaactgctcaaaagcttacttggactagtttaagagtccaagaagggcatggctttatttatacctgcactttatttcttctttccgaatttactctcctgggatgtgaagcatttctctcaaccttccaatttggggagaatttgcaccaaaaattctgggaggccaagaggtacggaagtagaggaccacatcatatgtcccctcctgcctcaaagagaagcatcaggttgaagtttaggggaaattctcatgattctttctctcatactctactggattttatgctcaattaaattaatcccattgaataggaaaattagttccagcttgtactctcacgtctacatctaagttattgaggaaccatgggcaagtcatttgacgtgtcgggggaaggggagggtggttatctgccagagatatattaacgtgtgctctgcctaactcccagggtgtttaagcctaaacgagtcaacaggtgcgtgtttttgaaagctcactactccccatcctcttcctatatatccatatatatccaataaaatctgactattgttttctaaagtatattgattggaagagttgttatcgaatccagtaatcttgaattggaatgattgagttaatggccatcagcaaagtgtgtatctaaactggcttgtgttttttttcagattcaaactcagatgactttgaccctgcttccaccaagagcaagtatgactctctggattttgatagtttactgaaagaagctcagagaagcttgcgcaggtaacatgttccctagctgaggatgacagagggatggcgaatacctcatgggacagcgcgtccttccctaaagactattgcaagtcatacttaggaatttctcctactttacactctctgtacaaaaacaaaacaaaacaacaacaatacaacaagaacaacaacaacaataacaacaatggtttacatgaacacagctgctgaagaggcaagagacagaatgatatccagtaagcacatgtttattcatgggtgtcagctttgcttttcctggagtctcttggtgatggagtgtgcgtgtgtgcatgtatgtgtgtgtgtatgtatgtgtgtggtgtgtgtgcttggtttaggggaagtatgtgtgggtacatgtgaggactgggggcacctgaccagaatgcgcaagggcaaaccatttcaaatggcagcagttccatgaagacacgcttaaaacctagaacttcaaaatgttcgtattctattcaaaaggaaaaatatatatatatatatatatatatataaattaaaaaggaaagaaaactaacaaccaaccaaccaaccaaccaaccacaaaccaccctaaaatgacagccgctgatgtctgggcatcagcctttgtactctgtttttttaagaaagtgcagaatcaacttgaagcaagctttctctcataacgtaatgattatatgacaatcctgaagaaaccacaggttccatagaactaatatcctgtctctctctctctctctctctctctcttttttttttctttttccttttgccatggaatctgggtgggagaggatactgcgggcaccagaatgctaaagtttcctaacattttgaagtttctgtagttcatccttaatcctgacacccatgtaaatgtccaaaatgttgatcttccactgcaaatttcaaaagccttgtcaatggtcaagcgtgcagcttgttcagcggttctttctgaggagcggacaccgggttacattactaatgagagttgggtagaactctctgagatgtgttcagatagtgtaattgctacattctctgatgtagttaagtatttacagatgttaaatggagtatttttattttatgtatatactatacaacaatgttcttttttgttacagctatgcactgtaaatgcagccttcttttcaaaactgctaaatttttcttaatcaagaatattcaaatgtaattatgaggtgaaacaattattgtacactaacatatttagaagctgaacttactgcttatatatatttgattgtaaaaacaaaaagacagtgtgtgtgtctgttgagtgcaacaagagcaaaatgatgctttccgcacatccatcccttaggtgagcttcaatctaagcatcttgtcaagaaatatcctagtcccctaaaggtattaaccacttctgcgatatttttccacattttcttgtcgcttgtttttctttgaagttttatacactggatttgttaggggaatgaaattttctcatctaaaatttttctagaagatatcatgattttatgtaaagtctctcaatgggtaaccattaagaaatgtttttattttctctatcaacagtagttttgaaactagaagtcaaaaatctttttaaaatgctgttttgttttaatttttgtgattttaatttgatacaaaatgctgaggtaataattatagtatgatttttacaataattaatgtgtgtctgaagactatctttgaagccagtatttctttcccttggcagagtatgacgatggtatttatctgtattttttacagttatgcatcctgtataaatactgatatttcattcctttgtttactaaagagacatatttatcagttgcagatagcctatttattataaattatgagatgatgaaaataataaagccagtggaaattttctacctaggatgcatgacaattgtcaggttggagtgtaagtgcttcatttgggaaattcagcttttgcagaagcagtgtttctacttgcactagcatggcctctgacgtgaccatggtgttgttcttgatgacattgcttctgctaaatttaataaaaacttcagaaaaacctccattttgatcatcaggatttcatctgagtgtggagtccctggaatggaattcagtaacatttggagtgtgtattcaagtttctaaattgagattcgattactgtttggctgacatgacttttctggaagacatgatacacctactactcaattgttcttttcctttctctcgcccaacacgatcttgtaagatggatttcacccccaggccaatgcagctaattttgatagctgcattcatttatcaccagcatattgtgttctgagtgaatccactgtttgtcctgtcggatgcttgcttgattttttggcttcttatttctaagtagatagaaagcaataaaaatactatgaaatgaaagaacttgttcacaggttctgcgttacaacagtaacacatctttaatccgcctaattcttgttgttctgtaggttaaatgcaggtattttaactgtgtgaacgccaaactaaagtttacagtctttctttctgaattttgagtatcttctgttgtagaataataataaaaagactattaagagcaataaattatttttaagaaatcgagatttagtaaatcctattatgtgttcaaggaccacatgtgttctctattttgcctttaaatttttgtgaaccaattttaaatacattctcctttttgccctggattgttgacatgagtggaatacttggtttcttttcttacttatcaaaagacagcactacagatatcatattgaggattaatttatcccccctacccccagcctgacaaatattgttaccatgaagatagttttcctcaatggacttcaaattgcatctagaattagtggagcttttgtatcttctgcagacactgtgggtagcccatcaaaatgtaagctgtgctcctctcatttttatttttatttttttgggagagaatatttcaaatgaacacgtgcaccccatcatcactggaggcaaatttcagcatagatctgtaggatttttagaagaccgtgggccattgccttcatgccgtggtaagtaccacatctacaattttggtaaccgaactggtgctttagtgatgtggatttttttcttttttaaaagagatgtagcagaataattcttccagtgcaacaaaatcaattttttgctaaacgactccgagaacaacagttgggctgtcaacattcaaagcagcagagagggaactttgcactattggggtatgatgtttgggtcagttgataaaaggaaaccttttcatgcctttagatgtgagcttccagtaggtaatgattatgtgtcctttcttgatggctgtaatgagaacttcaatcactgtagtctaagacctgatctatagatgacctagaatagccatgtactataatgtgatgattctaaatttgtacctatgtgacagacattttcaataatgtgaactgctgatttgatggagctactttaagatttgtaggtgaaagtgtaatactgttggttgaactatgctgaagagggaaagtgagcgattagttgagcccttgccgggccttttttccacctgccaattctacatgtattgttgtggttttattcattgtatgaaaattcctgtgattttttttaaatgtgcagtacacatcagcctcactgagctaataaagggaaacgaatgtttcaaatctacttctgcttttcttatttatcgtaaccaaactcctggcatgtttctcagatcagtacccattactcgcttattattattctatttcctctctggctctctttccctttctccttgcttttccatattcatggatgcatttcagctctaaggtaacgtgcatcttctgtatcttgtctttttctaaacggcaaaggcagacgtggtggtttctataacgaacgttcagaggtgaaaaatgacaggggattgtatcaaatggattagctctatttttgtacttaaccctgggaagtgtgtatttttaagtagaagctctttcccctagggaaaaaactcactgaatattcagtatagaaagcgattttgttgtagatggactgaatatttctccaagacttgtaacaggatgcagttccccatcatatggaagtcatcgggttggttaaatatgggatgagctgatagctgaagacacatcgtgctgtcaggatgtccactgtggctggtagatgatgacggtcctaatgacagagaatgcccttgcccaatttcaaatggttgctcccattgccaatcatttgcattgcaagactcaacatatgcaacattggggaaagatggctaaattatattccatcatttccatctcctagagagaaaaagagtgtttgtaaatattggaaatgtgataagagctatcagaagtgcattgaaatctgctaaataacataagatacactccccatggattgttttataccaatataaaattcatcaattatttattttatggaaatggaaaataaaaatctaccattatcttatcttacccaaatactgaatttatctgccactgtggataccaagcactcctgagtttcaatagataagtaagtctcagttcctgacttgtcttctattgttgcttaaattgcataaggcatttttaatcttccggttggaaccagcaaggacattagaactcttccctaaatgcttaactttttaacctaacaagtcttttgagggcggagagaaaatgagggattttcagaagcagcattagtagctgctagtttggtactggaatatcctgattgagataaaggatttatttcatattgtcctcaaaacattgactcactttcattcttgttgatactaatggcaaaataattattaaaaccaaaattgggctgacaaaaaaataacatttgatatagctttttttaaaaaaagattgtctcaattcaaaagtcctccaaaccaaatctgtctaaactgtatacaatatgatattgaattgaaattcttttttagcattgtcggttttctcttctttgtaggtttatttagctaatcattggatataatttacagccctaataacgttactatactgactcgactgtagtgttactagctacacatttataactcagtattagttatagaatattttaactaaaacattccatttgcaatatttatattaatcttatattttgcaattttcgttgctactccgttttcaaacacactacaatccattataaatcaatctttgtactttatcaaacggcagagagtaataaagaaggtcacaactcatagaggagttccttggaggtttgtaacatcatgatttaaatctcagaaagatttaatcaaaagctgaattaatccctgggggaaaagatagtatatagattctattgatggacacaaagcagcctatttctgttcaccggtctctgttagcatgttggggaaaagaaatacagattttctgtgagagggaaaataagattttcttgtaggggaaggatggtaagacataaccttcacgttatgcttcctcccttccactcaaaatggcccatttttattttccacttactggggcgttatctgttctcctagtgcatggagaatgttaaatgtcctccacccccatgtttcccttgttatattccatgtgattccagtaactatgc

SEQ ID NO: 172 - DNA, 27821 bp, Human
gagtgcagtggcgcgatcacagcttactacaagctccgcttcctgggttcacgccactctcctgcctcagcctcctgagtaactgggaatacaggtgcttgtcaccgcacccggctaatttttttgtgtctttagtagagacggggtttcaccgtgttagccaggctggtcttgatctcctgaccttgtgatccacccgcctcagcctcccaaagtgctgggatcacaggcgtgagataaaactatacttaggttttcttttttttttttttttgagatggagtcttgctctgttgcccaggctggagtgcagtggcgggatctcggttgactgcaagctccgcctcccaggttcatgccattctcctgcctcagcctcccgagtagctgggactataggtacccaccaccacacccggctaattttttttttgcatttttagtagagacggggtttcaccatgttagccaggatggtctcgatctcctgaccttgtgatccacgcacccaggcctcccaaagtgctgggattacaggcgtgagccaccgcgcctggcctgtacttacattttcaacttaagatgtatgcagtttggtgtatctaaattacacacccatttaaaacatggcaggatggcacctggttattcacctaggttcttctgtagcagtgaagaaaagaaaatacctccccttcttatctccaggtcaaggtacagtctgtgcagctcagaaacacttttaaaacaagctatattatttctaaacaaagttgtatttgaacagtgttcatgttcattttattcttttttttttttgagacagaatctcgctttgtcacctaggctggagtgcagtgacgcaatctcagctcactgcaaactctacctccccagttcacgccattctcctgcctcagcctcccaagaagctgggactacaggggcccaccaccacacccggctaattttttgtatttttagtagagatggggtttcaccgtgttaaccaggttggtctcgatctcctgacctcatcatctgcccgcctcagcctcccaaagtgctgggattacaggcgtgagccaccgcgcctggcctcattttattctttggagcttcgtctgtgaggttgccttcatttttgtcctctgtctagactctctaatagggaaggtagccctccacctaccccacccccaaagtaagtaaggtgtctgtcttcaaaaacagtcagttccactgagcaacaagtctcctgacttcctaggcccgcacaatctgtcaagagcaacaggacgacacgatgggtttgggggatcatgtgtccaaagggattttgttccagagatgctatgcgcggcatgatgtttccctgttaccactttgggaacacaatctcttggcaactaaacctgtaaactcagattaacagagctctttcccttcccaaagttggttttcctttccttgaatcttacttaataaacattgctgctcccagggttgagttggttttatgtgtttacgataagttaggttcaaagcgcccacgtgcagtgccttatctgtcctgccccggcctttcctctaaggagtccaaaggataaagcctggttataaaaggccacagccaacctgctgggctgtgagtggaagctctggtgcagcatggtaagtcagggccccatgtgggcaggggatttggcagggcgggggcagcccaggctacaagagggacgtggcccagaggcggggaagccaccacagtggagcccctgagtccagggtcctagtgtgctgctgtctaactcctgtgcactgggaggactcagcctcagggtccccacctcaagggagagccctgtggggcccgggttgcggggcgtctgttctactcactgtccttgtgacccgggctcctgacccagctgggtcctgcccctgccagcctcactgtgcgcatgggtctgtgtgtgtctgtgtttccatccatgtagatgctgcccccttggaccctcggccttctcctgctggccacagtcagaggtgaggatgctgtcaccattcctttagggagaaagtgacatgcctgggctggcctttggtgaggcagctagaggtatattaataattattataatgattatgaagagcattatcgttacttggagaaaacaattgtgccactcagagagtgttgactctcaggcagacacagggcaacgtgccggacacagagtatctcccgtaaccctcctacttggccaccttcttcctgcaaagactctcacggctgggagacaagtggagggtgtggtgttcccacctgatcccaatgcccttgtccttgcctgcagaccaaagtcatgtggatgtgccctctcccaagaaagcccagtcctgccaggcaagcctgcctttctgccatcaagcccacgtgtcctcttctcagagtcaccgtttctgtctctccagtttgttcccccgacctggttctgtccagaggagatacagatattcaagttctacttatcctaaaacacaaatcacctccgtttcttttggagccccctgagccccagcctgctgacttcccatctgcctacgccttcacaggcgtgcttcctccgggagtctttccctctccgtgggggctgcctcacctcctctcctgccagaatacctcactgcccaatttggtcccccaagtcctgctgtaggagacatggtctccttgggtccctgtgggggctttcttctgccttgtgactcttcccccttgtcttctcaaccccgccagcccactcttggcctctccttccatcctggccatgaattaaggccaggctcctgacggcagagaccggggtgggtgcgactgctcctccggccatacaacccctcttcatctcctttgctgacctgcagcctcctcctgccccaaatgtggacattccccaaggctcacgccaggctctctcctcatctctctcctcctagggccttccttcttgcccagcttcctggtcttcccgagttgcaagaagccctatcagggccaagcctcaagcctcaagcctcactctcacttccctgcccccagccttctcaggcttttctgcttctcagccccctgtactcgagtcccaaaaacacaggactgcctgtggaagcacagcattgccactgccaccaccacctcccctcaacctcaccaactcacaccttccaacactttcctgctctccacttaagagagcccaggtgtcttgcattcgagccccttcatttaaccagctacctttcccctggggcaaacattgcttaagcctcctagagtccacctccaagggtgcaccctcttcctggaatgaattcaacgccatcagtattgcttccctattagagctcctccctttcaggacagggttcatatctcatttatctttgtgtcccctcaagttctagctttattcccagttaaacttcttgggttcaaatcctgcctccaccactagctgtgacctcaggtagcttaccttgtctctctgtgccttggtttcctcagcagtaaaatggagataatactaattccatatttgtgttttcaggcttaaatgatactataccagtaaagtactaacatggtatctggcacatagtaaacaaatataaactattatgcatttttttaatgattcaccaatatttggcatcatcagtacaggagttgaggaagcataagagaaaggacccattataatcctttgggttggaattatgtcacccgtagtgaccatatcctgtgatcatgtttatgtcatggacacagaaagtactctcagacttagatgtggttacttggatcatggattacatgtattgagtctctactacacgtagtgtgatacacaagtcattcctgttcttaagaaacttactttttcaaagagcaaaagagaaaatatgaaacggcagagaatcaccctttcaaaaaaatgtgcataaaaggatgacatgaagacatgtgaattggtgtgggcacggcctatgctgtgtgtaatagagatgtcaagacaaagtagcaactctgtgctacagagtttgtaggcactcgataaatactcactatttgatgcttacatgtaaagagtcagctgcaagtttcctgaaagaggtggttttaaggcagcagtttgtattaggttggtgcaaaagtaactgtggtttttaccattgaaagtaatggcaaaaaccgcaattattttgcaccaacctatgcatcagcaattccccaatttgcctaatggtaaggggcacttactgaatatgtgtttctaggaccccaccccagaccctctgaaccagaatctctgagggagggacctatgaatgtgtatgtacaatacacctgttccccatactgccgcctgcccccacccgcccttcccaccccgcgacgccgcagcccccaggtgattcttatcatcccagaggtttggaaaatgatggcaaagataaagaccagcactggccttagccaaacctgggctctgtcctgcagagttttcctgtatggatatgacgttgcttctttccagaagttcacacatgtcctgtttgtggctcaccctaggaaaagaggtctgctacggacaacttggctgcttttctgatgaaaaaccatgggcaggaacccttcagcgacctgtaaaattacttccctggtcccccgaggacattgacacccgctttcttctgtacacaaatgaaaatccaaacaacttccaagtaagagcaggcatgtaagcgctgcatggtgggtgtatttgggccgccacagtggagtctttgcatggctgtctagggcataagtcactgccctggaattttccagaaactccaaggcatagaatccaaggcgtagctctcaggatcataaacacctgagtatctgatgaaatctactgatgcctaacccagaaacttacacattcacacacactggtgcagagaacttcaggggctaccccagcgtaaatgccttgttccctgggaggaagggactatgagcagcatttatggagaagcccaggcctggtgtagccaccggaaagtctgcctcgtttctacacaggagagtggagggggagaagcctcttgggcattgggggtgggggtgggtgtgaattcttcctgaagagctaggagacaggtaggggagaggggacatgtagccacaatagataaaagatgaggtcctctggagcaacctccagttttcagcaggtctgcccatcagaagcagatcagacttgctccagagtgtcagaagtgaccaggagacagtttcaagaaagacattgctgagaatccagcagctcacagctctggtccctgacagagtttagggagccaggtgtctgtcaataggtttctgaggtcacccactgtgggactctatctgacagaccagccttcttagtgcccccagcccagagtcggcttggacatggttacggtgcgtctcatctgtaggggttggtggcatcttctggcatctcatctgtagaggttggtggcatcttctggcgtctcatctgtaggggttggtagaagggggtcgagcagcctgtggcaatttagaagtgcattccaaagtctcacagctccactgaactgaatttgctcccacacttaagcttctggtccaggggttcctcaccttttctgtgccaggaacctctctggccacctggaagaagcctaaaggccccttcttaggtcaattttttgttgttgttgttttttgttggtttgtttgttttttttgagacagagtcttgctctgtcacccaggctggagtgcagtggcgcgatctcggctcactgcaagctctgccttctgggttcatgccattctcccgcctcagcctcctgagtagctgggactacaggtgtctaccaccacacccagctaattttagtagagacggggtttcaccgtgttagccaggatggtttcgatctcctgaccttgtgatccgcctgcctcagcctcccaaagtgctggtattacaggcgtgagccaccgtgcccggccaggtcaatgtttttaaatgcagaaataaaatatattggattacaaaagaaacgaattatattgaaaaataattaccaaaacatttaaatatataaatatgtgatatagtcatatatgtgctttttatatatcattaaataacaagatctaggggttggtctaataactactataatttaaaatattaatgagtataaatgatatttttagatatctgcaataattacattatgacctgaaaatacctgtgacttctaccggggacagagtcacaggtgttgctaataccactgtggtttattgtctagttttgtgattaactgaaatgctagatatggattaaggattaactaaaatagaaagtctgtgaatttggactttctgaaatctatccacaaccccaggtcaggagctccttctagtctgacccagctttgtgggcattgaagctgtgatatcaattctgaaactggctctaatagactcgtggcttggaaagggcaacattcaaattaatctttttaaattaaaccagctaatcactggcacggaaccagacaccattgaggcttcaaacttccaactggaccgcaagacacgcttcatcatccatggcttcttagacaaggcggaggacagctggccatcggacatgtgcaaggtagggccctaccacttggccactccctggtgagaccagcacccaacacacagattcaaacactgtacccccagtttcccttagactgggaaaagaaatacttcagagagagatgggtcctttttaaaaccaccgaggaaagcccagttccaaagggcatccattaccaagctctctctacctaccaatttctagccaacaatctcctatgaggctgaagacacccagagttcagtcaaaaagtctcgaggtggagactgcagcaaactgctgggcatttatccctgaggacttatgtaaaacccctttgtgatgttaaaaacacttaaattttaccctctaaagcaccgctatccaatagaatgttctgcagtgatgaaggtgttctatatatgcactgtccaaatcagaagccactggccacataagttattcagcacttgaaatgtggctggtgcaaacgaggagctgaatttgacatgttattgagtagtagtagtctgctcacacctgatttagtaagtggtctttttaacctggttgtgttcctaacgatgtgtgagacctcagacacgtcactcacccattccagggttcagtttccatatctgttaagcgggtactagcatgtccagtccatagcactgcagtgagggtgacgttatggcaggtataagaacatcaaagctctggcatgggctaggtgtttgacagacgtgaatgcctatctctggggtgtgcacctgggggctgtttataaattgatttctctcccttgtttgtcttccccagaaaatgtttgaagtggagaaggtgaactgcatctgtgtggactggaggcacgggtcccgggcaatgtacacccaagccgtgcaaaacattcgggttgttggggcggagacagctttcttaatacaagcactgtcggtaaaaccctgcctgggccctgtcctgtgggtaggggtcagagaggggcagggaggtaccacgtggcatggagaggcagcctggggacccgtgggcatgggtaggggccggcagctagtagcccagattgcaatcaagaagggcaattcccaagatgaagctctgcaaccttcctctttgcctgctgtcctgaagataccttgccctatcactgtctagctgtggggcctgaggcaaactaagccttggtttccccttttgaaatagaccttccttgcaggctgttctgcaagggtcacagagcaggctgggctgcccagcagctcccagtgcagaagatgagttttcatccttcgccaacccacgagggaaggccctggacctttctgcaggatctatcgggagggggcggggggagccagagatagggcccactctacccgcgctcgcccagacaggccatacccctggcagggacgaggaaagggagctgggggtggggcagtcccgggaggcaggccgtgtgcctcgcccgcccaggtggcctgcagttggcatggtggccgctggtcagcactgttgccccgcgcacgagccggcctgcgggactcgcaggctgcaaatagggagcggggtcgtcctaccccaggcggcgtgctcgagcccgggtcctgcccccatccctggcagggcccggcgccccgctctcagaccagcgggtccccacgcggtgctgtgggacctgacacgctatccctccgcagacgcagctggggtacagccttgaggacgtgcatgtcatcggccacagcctgggcgcgcacacggccgcggaggcgggcaggaggctggggggccgcgtgggcaggatcacaggtaggggtcgcggggccccgggccggagtcccaggcccccgggtgcgcacctcggaagcctcggccagtgcctttccgacggcgaagggcgcccctgatggtcctcctggggacccgattttttgtgatgaccggccttaaatttaaaaataattttccataatgtgtattagaaaatagataattaaaaataaaaatgcattcattttttaaaacaaaggctgggccactggctcacacctgtaatcccagcacttttgtaggctgaggcgagagaatcgcttgaggccaggagttcaagaccagtttggcaacatggtgaaaccttgtctctataaaaaatttttaaagttggccaggggtgatggctctgcctgtagtcccagctactcgaaaggcccaggtgggaggactgcttgagcctaggtgttccaggctgcagggagctgtgatagctccactgcactccaccctgggtaataaagggagactgtatctcaaaaaaaaaaaaaaaaaaaagagaaaggaggaaagaaaagaaggaaaggaggcaaggaaagaaagaaagaaagagagagagagagagagggagggagggaggggagggaaggagaaaagaagtgaggccgggcgcagtggctcacgcctgtaatcccagcactttgggaggccgaggtgggtggatcacgaggtcaggagatccagaccatcctggctaacaaggtgaaaccctgtctctactaaaaatacaaaaaattagccgggtgtggtggggggcacctgtagtcccagctactcgagaggctgaggcaggagaatggcatgaacccggaaggcggagcttgcagtgagcggagaccgtgccactgcactccagcctgggcgacagagcgagactccacctcaaaaaacaaaaaaaaaaaaaaaaaaaaaaaaaaagaaagaaagaaaagaaaaggagaaagatttaactagcacattaaatccatgacttaagagctattattttcagagtatggcaaagtaaaagaaaaaatgtgagatggttttaaaaattcgtcagttccacgtaattgtttgaatgtctctactgcgccaggcaaagacagaaaatgcaaatgcacactgagacctgccatatagaaggcgctcagtaaatactgaatgaatgaatgaagcactaaactgaatgcatataaggcaaagacacaaataacttaattttgtgcagccaaatcagtttgtaacttcaccaaacagttcacatcaacatttaatgagcgtccctttgcccaaggcactgggtgaaggatgagggggtattggtttgtgtttatgtagaattttgcagtttgcaaagtcccttctcttacatctcttcatgagggtttcacaacgactctgtaaggtaggggttgtcattattcctgctttcccgataaggatacagaagctcagagagggcagacatttgacctggagtagaactagggcaagaatacaggccactgtgtgccccctcctcccacgctctgtttctctctgaagatgacctggggacagcataatacaaagtggatggaatgggctgagaaaggagaggggttagattttccatttaaccatgaggaggtggtgtgtgagctgggtttggaggagaaagatttagataaaggaagaatgtgggaaagagcacagcaggctggagaatggcgtgagccaaacaaaggagtagatgctagcagctgggtaaggcctggggtcttgcagtctctgagagcagtggccaaatggtaatgtgtgaggacaaaaagaaaaagggaaagaaggggtgtacggaggctacccagatcctccacggagccaggcactgggtatttctgaatgttcatccacaggcaatgaccccattcccagcctttctgtcccagactctctctcccaggcagaccaagaactgcagacccaatccccagaaccatagctgctggggtaggaggaatcctcatgcttagtctgccagtactggctttaaatcccagttcttaagagtccagcctgcctaccttctccctttcagggctggatccagcagggccgtgcttccaggatgaacctgaggaggttcggttggatccatctgacgccgtgtttgtggatgtgattcacacagattcttctcccatagttccttccctaggtgagttcctcaatcccatctcctgctgacctgtgctacagctaatgacattgggtccagatatcccctctcacacatacatacacacacagcaggggaggccatttgaaatagctacaggaatggcttgggcaccaaccagtcaaaatgggtaccagtcccaaataaatagctagttcaatgccagtggaatcagcgtgcagccctgggttaaacaaaaacccttctgtagtctatgaaaggttgtcaatcaatcttcaaactctgcatccttccccaatctaccagtaactagtggggcagatgtattcattcttaaaacttgacctgtacttgcaaaatacgaagttaatttttgaatatttttcttacttcttcagtcaaagctttggttacactttgttttgttggcaactttatcccattctttaattcttctaaaatcagtgtttttttttcaatattttcttatatagccactcatgaaacttgccaataaagggtatgtttttgatgatgatgatgatgatgttatcacttacttagtgtttaccatgtgctacactgaacattttgcatacattagcttgtcaattctgtaacactctaaaaagtgggctttattaccaccatttcatggctgaggaactgaggctcaattaggttaagtaattgacccagatcacaaaatctgtaagtaaaaccaggatttgatcacgggttcatatgctttgaaagccaaagagcctagccatatgctacggctcacaatataacaatataatgttatgtagtctccacataacaatataatgtagacatcaaaattttaaaatgagtaaagtaatacaaattgcaccagtcttgataggtctactggtgcataatggtagcagggcatatcaatatggtccaagactctccgagacacacagatgcacatccaaatgtatgtgtctcactcacccaaagctcagcctccccctcatctcacttcctctgccctctcctccgtcctcatcttgccaagcacccatctttgagaactttctgcagagctagaggcagtggtagctgtgataaagggagaatttgccaaaaagggtcttgctgtggccacaccctaactttggcaccagtcacctcgccgctcatctctgcttcaaatattttaggtttcggaatgagccaaaaggtgggccatctggatttctttccaaatggaggaaaggaaatgcccggatgtaagaaaaatgtcctttcaaccattactgatattgatggaatatgggaaggtatgtaaattaaagaagtaagacagcaattgctctgttcggggagaaagcagaatgcatggtctggccttcataatgctgacatttgccaccgtttatggagtgttgtgaaaatgtgccaggcattttcacagcaatgcaatgagatagttactctgattagttccagtttgcagatccaaaaactgaggatccgaaaaattacataactcaattgggcgtggtggctcatgcctataatcccagcactttgggaggctgaggtaggcagatcacttgaggtcaggagttcaaggacagcctggccaacatagtgaaaccccatctctactaaaaacacaaaaattagttgaatgtgatggcatgcgcctgtagtcctagctactcaggaggctaagatatgagagtcacttgaacccaggaggtggaggttgcggtgagccgagatagcaccactgcaccagcctgggtgacggagtgagactgtctcgaaatatatatataaaaaaagttacatagctcattcaaggccgctctatatctaagcccaatttctaactataaagccctgagctcatgccccagcctgtgtatctccctgttgtcggcatcctgggacagcggcttggctggcatgttggctctggctttgaccacctatcctacctgcagcacctgctccttgaagaactgcaggacataggccaagatttgaaggccttgacttgcttgctggttgctgttgttgggtgctagaaatggaaggggactttgctgagaagaagacaaaggagggatgtgctctgtgggtttggggtacacgtgtaggagggggaggcctggaggtctgggagacccatggtggctgctggccagctgtgtacatttctgttcatctgagagagcacggcccatgccctgccattaggcgacctcatagccccatctgatttgctgccccttgctctggccttttttgattcctgttgcccctcccctgacaccaggcttcactctcctccctgaaaagagaggttttgggcctgtgataattttagtctatttttctgagctgggagttccccaaggccaaggactatgttttgcacatttcagacactccagtaccctgctcagggcctcatccaaagcaggcacgaaatatacttttaaattgagttgagtagccttgtgtggcattttaatattccatgtgcttaatgtcaaagagcagagtcgataaagcgatcgccagcatccaccggcaaataaacggagcttttgccctctcaggtaactcctggggagatgtgaccattccaggctccctgaaagcacaccagagtcacaataatagctgccccctcccacaaacgatgagcaaggcacacataataggaacgagtccaggtttaattagagaagcaatgtcgagtgaacaagcccatgagcactggagtgtgtttctattgtgtcaagctccgagtcatccaggcagtgggcactgaggaataattaaatccactttctcctccattatggggtcccagggcagcaattttggatgaaagaaacaattaagtttgaaacaggttctgttgtccagtgatgagcaccagtgtgggcacagggaacgtggcttcagctagaagtcgctgggccgagggccgggagccgtggagtacgaagccaccctgggcacaaagggaagtgttcctttctcagtgggtggcgataaagccccgcagaccccccaggagtggtccgcaggtgtgccagggtcactgtgcatttctccatgggaagttttctaccaagtagccagagaaatgaaaaaacacctttccggactttttctaaagaaaaggatgataaataaaatgcagtaagagagtggccagaggccatggccaccttgccatcaccgcttttaccttgtgccctgcatagcaaagaggaagaatcaaaaagcctggttgatggggaaggcctgcccggtatgtcctcacagggatcctcacagggataggatgcggtctgcagcagcattggatgggccggcatggtaactgtttttaagatggggatgcgctgccttcactcacgcatgcgaaggttttcaggtagaagtggagatcctggcttcttatgaaaaaatcagaggaccaggcgatttggggctttgaacatgtgacacctggctagactgtgtagggttagaggggccctttttacagctattgctatcttctcttagtctctctctctctctctgtatgtatgtgtatatatacatatatatacatatatacatatatgtatgtgtatatatacatatatacacacatatagtatgtgtatatatacatatatacatatatagtatgtgtatatatacatatatacacatatatagtatgtgtatatatacgtatatacacatatatagtatgtgtatatatacgtatatacacatatatagtatgtgtatatatacgtatatacacatatatgtatgtgtatatacgtatatacacatatatagtatgtgtatatacgtatatacacatatatagtatgtgtatatacgtatatacatatatagtatgtatatatatacatatatacatatatgtgtgtgtatatatatacatatatacatatatatgtgtgtatatatatacatacacacacttgtatatatcatagcgtatgtgtgtatatatactatatatatacacacacacgtataccctctctatgtctctctcctctgtctctgcatctctcctctgtctatctatcctctctctctgtctttctgaatctctctctttctcatcactatctctttttgtgtttctttttctctctccatttctctctctgtctctgtctctctgtctccccctccaccggctctctgtccctctctgactctctgtctctctctctccccccaccaactctctgtctctctctgatgctctctctttctctccccctcaactctctctatctctctctgactctctgtctctgtctctctctcttcccttaccaactctctgtctctctctcccccaccgactctctcgtctctctctgactctctctctctcccccgaccaactgcctctgtctgcctctctctatcactttctctctctctctctctccctcaccaccccaccctattcccagcccccagccctcctcattcatttgtgttacatgcctggcccctggaagagtggacaaaggtgcttgtcaggacatgtcactcctccacagtcacctagccctgagtaggtccctgctcagcaaatgccccaagatattcaggagccgacacccatcggtgaaatgtgcaggtgattcttccttagtcagaatgagttgttcacacttaaaagtgaaaggcctcctttgagctcccgggacctttgtttttttcaggaattggtggctttgtgtcttgcaatcacctaagaagcttcgagtattactcaagcagcgtcctcaaccctgatggcttcctgggctatccctgtgcctcctacgatgagtttcaggaggtaggttaccccaggaggctgaggaagatgttgctggccctgtttggggtgtttttgtgttcctgtggcttagaacagaacaaagagatgtaactctgcaactaatgcagggaggtaatggaaattctgcacctcacaaagccatcttcccccaggcagcagggtgggctggagggggaaggcacagacctgactgtgctgggcccttactagggtccccagttgttcatttagaaaaatttccaatttgcaaagaaggtgaaagaagaataatgatgaatactgtacacctgtcacttagatgcaccagttgctaatattttatatgtgtgtgtgtatgtatactttttctaaattatgtgaaagtaaattaaagacattatgacatgttacttataaaaactttagcctccatctcttaaaaacaagatccttctcctatagaataacattcaagaaatgtatctttgatacactaatattttctaatatatagtacatattcaagcttctccagttatccaaataatgccctctagagctgtatctgtttgcctgccttctttctttccttcccttcttcttctttttttttttttttttttcgcattgcaattattttgttgtctctttagtcacctttagtcaagaacagcttcccattttttcttggtctttgaagacttgccagttatgaggctttcagaccaggtatttggcaggatatctcactctctgaaattgtttgattttttaggcggtgcttcagtgagtaatagcaggtccttctcagtgtattacaactaaagagattcatttaatgttcacttattatttgatgacataaattcattcattatttgatgacttaaactttaattacttggttaagatgtttaaactcacattttgtcctttcaaaactaattttaaccttgacattcttgggttgaactgaggtcaaaaggacatcgtatttgatctccaaggtctgtgagtgttcagtgagaaggcttcactgtgctagttcttgttgggtcatggataacaacatggcctccagtatttgtctgattcctaccaaatcacaaaacagctctacacatcatgcattttggatgtggcatgaggtcaaaaagcagaggacaatgacactgtggcataaagcaatcaaatccctgattcaaagacagcaagttgcctcctctgcgcctaattaaagaactatcatttgagaagcaacaaataagaatcaacaagtctggagaaataattcacattaaagtgaaaatggtcctggaccttcccttcctcacttcttttgaaataacttgccatctctcccacttctccctacatatattatatttcataccccattcatattttaattttactgcttcctggatatgacttgttttcccaactatattccaagtttttgaggcacttatttggatactctgcagggcctagcacagttctatgcacaattccaagggtggaagcatggatgcatgggtgcatgggtagatagatgcaggagtgcatgagtcagtgggtagatgagagaatggatggacacatggatgcatgggtgcatgggtagatagatgcaggaatggatggattagtggataggtatgagaatggatggatgggtagatgaaaggatggataagggatggatgagtagatggatggttgcataggtaaatgaaaggtggatggttgggtgggtgatgggtagataggtagatagacataggaaggaagctgaattgattgactaacagacaaattatgtttttttttttccactagagtaagtgtttcccttgtccagctgaaggatgccccaaaatggggcactatgctgaccaatttaaggggaaaacaagtgctgtggaacaaacctttttcctgaacacaggagagagtggtaactttactagtaagtttccattttactcacttcaaattcttgcgaataattttcaaaagtgtgccaaccttattagtcagtatccttggtaacaatggatagaaacttaactacaacaagcttaagttgtaatgaaaggacagtgaaatggaatttgtgttgggtctcacccctttaaccaatactcctgaccagcagagaaaagtacaatgattggcccaggctgggtcacatgttcacccacccctgttgctggaaggatgcatctattaacagaagagggcaacgtgaaagtcactgtaagtcaagaagtcagtgcagtaatgactatctattatattagtcctcctacatacacacactttgtggtgatgtcatttcgccctgcttcttattttaaaagtacaagatagtaaaattatcaagactcatttactgtgaataatagcacataatggctggaaaggagagcagttattttctaagagagtttcaaatttaaaaatttatatcagcactttacaaaacacttttcacatacagtatttcctgtaatcctcaaaatatttatcataaaagataagagtttggcagaatctataaaatcttatatgcacattcctttaacccagtaacttcacttctcagagtgtaccatagagaaatacttgcgtgtgtgcataagatgatgtgatcaaggatgctcgctctttatttttaagagcgaaagattgaggggaaaacctaaatgtccaccagttgtaaatgactaaatactatagattaaatactacatgtaaccattaaaaagaaggttatacctctgcgtactgaagagagaaaacctctaaggtgtattaagtaagaaggcaagtgacaaaacaacatgcaacacacccattgtcttcattggttcagactgctgtaatgtagtaccatagactgggtggcttataaatagtagaaatgtatttctcacagttctggaggatggaaatctgagaccagggtgccagcatgatcaggttctgctgcacattgctgtcttcttgctgtatactcccacgtggtggaaagaggaaaagagcactctctgtggtctcttttatgaggttactgatcccattcatgtgggctcttacccacatgaattcagtccattgtaccatgtatcagtcaaaatacacatgtgcagtatcagctgcccttcattcatccaagagcacataccttgctgtgttcataagggactgtgctgaactataatatttactgacccctgagtcccttgctcccacctagaacctaatgtacccttaattcctgggccccaggaattcaattaagtcacagtcctattgcctctcacccctggaggattcagagcttggaacaataatattttcatagatcattttttcaataagatgagttcattaaatgggttgtatttctttggacaggttggagatataaggtatcagtcacactttctggaaaagagaaagtgaatgggtacatcaggattgctttgtatggaagtaatgaaaactcgaaacaatatgagattttcaagtaagttcaatggtaatgtgaaatgatcatactttccataatagattattcaaaattgattgagtataaagtgctttataaatctaggcatctattatacagaaccactgaatcctagaatgtcagagctggaagaaagtctcaatgtctagttcaattgtcccattttacatatgagaagagtgaggcccagagagagggaactcactatttaaaatgagtcatgtgctaactccttttggaatgtcagtcacctgactagattgttttttctttttttgttattttattttattttagattcagggggtgcatgtgcagattcattacatgggtatattgtgtaatggtgaggtttggacttctagtgaacctattacccaaacggtgaacattgaacccaatggataaattttatcccttatccccatcccaacctctctccttttggagttcccagtgtctattctttccagttttatgtccatatgtacccattgtttataagtgagaacatgcagtatttgattttctgtttatgagttatttcgctgaagataatggccttcagcttcatccatgtagctacaaaagacatgatttcattcttttttatggctgcatagtattttatgttgtctatatgccaaattttatttatccaattaaccactgatggacacttaggttgattccatgactttgctcttgtgaatattgctgtgatcaacatacaagtgcaggtatttttctgataaactattccttttcatttgggtagatacccagtagtgcaattgctgggtcaaaatgaagttctatttttctatcaaggtatttgagaaatcttcatactgttttccataggggttgagctaactgacatccctaccaacagtgtataagcattcccttttctccatatccttgccaacatctgttattttttttttgactttttaataatagtcattctgactggtatgagattgtatctcactgtggttttaatttgcatttctctaataattagtgatgttgagaatttttttatatgtttgcttgatgtttgtatgtcttttgagaagttctttgcccactttttaatggggttgttagtttttttcttgttgatttaagttccttatagattctagatattaatcttttgtcagatgcatagtttgtaatattttctcccactctgtaggttgtctgtatactccgttgattgcttcttttaatgtgcagaagatctttagttcaattcagtcccatttgtctattcttgtttttgctgcatttgctttgaggtcttagtcataacttctttctttctttctttctttcttttttttttttgagatggagtttcactcttgttgcccaggctggagtgcaatggcaagatctcggctcactgcaacttccgcctcctgggtacaagcaattctcctgcctcagcctcccacgtagctgggattacaggcacctgccaccatgcctggctaatttttttgtatttttagcagagatggggtttcaccatgttggccaggctggtctcaaactcctttcctcaggtgatccacccacctcacctaagctaatgtacaggagagttttatcctatgttttcttctagaatttttatagtttcaggtctcacatttaagtctttcatccatcttgagttaatttttgcatatggtgaagaataggggtccagttttattcttctgcctatggctaaccagttatcctagcaccatttattgaataggtttattcaataaccctttcctcgttgtttattcttgttgactttgtcaaagatcagctagctgtagatgtatggctttatttctgggctttctattctgttccaatgatatatgtgtctatttttgtaccagtaccatgctgtttgggttagtgtagccttgtagtatagtttgaagtcaggtaatgttataccactggctttgttctttttgcttagattgctttggttattggggctctttcttattcatattctaaaacatgaattttagaattgttttttctaattctgtaaaaaatgacattgttaatctgataggaattgtgttgaatctgtagatcactttaatgatattgattcttcctgtccatgagcatgggatgtctttccatttgtttgtgtcatctacaatttctttcatcagtgtgtttatcgtgctccctgtagagttcatttgcctccttggctaaatgtatttctaggtatattttgtgtgtatggccattgtatatgagattgagttcttgatttggttctcaccttgagcatttttggtgtatagaaatgcaattgatttttgtgcaataatttgtattctgaaactttactaaagtgatttatcaggcctagcagacttttaggggaattgttaggattttctggatataaaatcatgtcatcagtaaacagagataagtagacttcttcttttccaattggatgccttttatttctttctcttgcctgattgctctggctagaacttacagtactgtgttgaataggagtaatgagagtggacatccttgtctagtcccagttcttagggtgaatgctttcaacttttctccattcgacatagggttagctgtgggattgtcatatatggcttttattattttgaggtatgtttctttgatgtctagttagttgagggctttttatcatgaagggacattagattttattaaaagctttttctgcatctattgagattattatatgttttttgtttttgattctgtttatatgttgaatcacatttgttgatttgcatatgtagaaccacccttgcattcctggaataaaacccacttcattgtgatgaattatctttttaacgtgctgttggatttggtttgcttgcattttgttggggatttttgtgtctgtgttcatcagggatattgcctatagttttctttctgacttggattttgtaaatatcaaaatctcttcaggcaaggcacatctgtatggcacatacccaacacacaccccatcctcacacacataggtacacatatgaagcctgtggccatctcatccatgctgtgtggcctcagcatctggcttctgctgggcatgtgaggtgcttggtaaatatgtgttagatgaatgcataacctgtacaataaagttaggttctgtttttgcactaacttttacataaaaatgtttgtgttgaattaaatgtccttgacaaattcctgtaatacacatgagatgctaacaaatggcacctgctgaaccacatgcatctttaaacataagacattgccccaaatagtcctgtaacaaacttagagcattaatatgccaccccaaatattcgacttagctgtaggtaaaaactaaaacagtggaaatctggagtccagtatttttaaaaggtgtgttctgcacaaatacttttatgttatggcagcccctggatgtgtatgaagtcatccaaggtgtttgcagaaaaccaacaacagcaactattgtttagagaagtgatagatcgcaatcatgttatgtattcatatatccagctgatataacattttatgtctatattttcagaggatccctcaaaccagatgcaagtcacacgtgtgctattgatgtggattttaatgttggaaaaatacagaaagttaaattcctctggaacaaacgtgggataaatctatctgagcccaaactgggggcttcccaaatcacagtgcaaagtggtgaagatgggactgagtatgtattttttattgcatctaagtttggttatttatatttacatattgatctatctgtctaggcattcattcatccaattgcccacctactcatctatgtacccatctactcatccattcatctacccatctatccatttctctatccttttaaccacttagccacttacccattcacttattcctctacccatccacccagacacctatcttatcattcttctggccctctggccattatttgatcttccctccatccattcatcttcccagctgttcatctcaactctccatccatccatctgatttactttgaaaaaccaaacgttgttttccttaggcaaaattcaacttggcaggggcaaggcaatgattgtaggcacagattcaagaaacgggcaaatatgaatggctattttatctcaaacaataaggaaaacacttgggaagcacatagtggaaatctctgagttaattccagttgatgtgcagttattaatgtaaacaggtttgtttggagactatagcattagagggatacacactgtgttgggaatctggctcatagtggcaagttcttccattctgagagaatagaatcctacttagtaggcattgggagagaatataactgtttttaaaatatggaaagaatgacacctcaaaagaggataattcaaaaacaatgggatattagagaataaaggaaacataaatgttgactctcaactgatcttgttttaagatgaggaagtaagatttggaaagtcaagtaacttgtctaaggtcatgtagggaatctaaagggaaaaatattgaacttcagaatgttttcaaaacacacaccaagacttagctcagctgcatgactcaactttgctggctgtaaaagtggcaataatcccaattactcagtatattattggaaggatcagatgtcacagtcagcgtgccatcactttgtgtacagtagacccccttacctggggggatgggtgatataatccaagaccccagttggatgcctcaaacctcaaatagtaccaatcctacatatactatgattttttttcctattcatacatactatatgaataggaaatatgctggacaaagggacacttcatgtcctgggtgggacagagctgaacagagcaagattttatcatgctactcagaatgatgtgtaatttaagcttatgaattgtttgtttctaaaatttcccatttcctattttgggacctcagttgaccatgggtaactgaaaccatggaaagcaaaactgcagataatggggggctactatgctcagttgtaaggcacaacaaggactgggacccaggtcttctgacagcccctccagtgttctttccactgtgcccatcaactcagccagctggatgtgaaactgagaagtccatatggtctggtagtgcaatgcaatgtgaaaatgtctggatttctcagtatttaagtgggggtggagttcctgttttaagtacaatatagaacacatactgtataatccaaacaccagagtccccagcccacatgagggctctctcaccaagaagctacattctgaagctaacccggagggaaggccagcttggccacactgttccccttgcatcaaagtcacctgcaagggaaggaagaggccagaagtggccagcttctcatgcttggtgcttgctccaacctgacttagttagtttctcacggttaataaccctccaggatcttttttatttttaagcaattttattgaaccataattcccataaaacacaattaacccatttaaagtgtgcaattcaatggcttttagaatattcacagagttgtgcaactatcactacaatgttaaaatcttttcatcaccttaaaaagaaaccccagacccattagccatcatccctccacccgcacatccctttttctcagccctaggcatccactaatctactttgcgtctctgtaggttttcttattctggatatttcatgtaaatggagtcatacagtatatagtccttcatgactggcttctttcatttagcataacgttttcaaggttcatccacgtagcatgtatcagtactgcattgttttttattgtcaaataatattctattatacgactatgccacattttatttattcatttatcagttggtcatttgggttgtctctacttgggggctattatgaataatgctgctatgaacattatgtacaagattttgttttcatcctcttgggtatatacctaggagtggaactgcttggccatatgataactctgtttaacctttagaggaattgccaaactgtttccaaagtggctgccacattttacatttccagagcagtgtatgaggggccctctctgattttaatttgacagagaaagtcccctctgtgctggctggggcactcttggtccctggaactcattgctagacccaaagaggcagtcccatcagagtcccctcagttttgcagtttgcaaagcttcagtttgacatggctgattcactttccacccattcagagcccacatggggagaggagtgctctttgagcaggttttgttagtaagaattacttggactctgcctggtaaagcagaacttttcggtcaaggggagccgaatccagggggttgcccaaatgctgtttactcacctgaagtcacatttccacaagcaaaagagcctcatgctgacaatcttttcctccacaggtataatttttgtagcagcgacactgtggaagaaaacgtcttgcaatctctttacccttgttaaaaacgtggtgcggctattgcggtaataaaatctttaatgcactcggtttgagggtgagctgttagtttgacattctctactttctgggttcacatttcagaaatgatttgggggattggagccaagtttgccacaggtgatgcctggaacttctcacccacttacctctgccaccatctctctctttccaggcactttaggtggcccattccagcggattttatttccttagacaatgaacttctgtcctatttgtaaaggtcattgttgctctcacttgctgcccaaccagcttttaacatcctagggacacaaggtagacaccacataagcattcagaaaatacaaagagaagaaaagcaaaaaaggagaatgaaacaaaaatcccgagatattgccgcattttgtggcaggtgtaactccaaactctgatgattttgattaaaatccacctgcggcatggagacagcggggcttttttttaaaaaaaaaaaaaagttaatgcatgcacatgttacaaaattcaaatgatacagaaaagtattcttatgaaaggagaatctctttcccccttgccttcaagtctctcagttcttcttcctagagacaacctgggttttttcaagaaatagtccatatatccttatggatatatctattttacacactcaaccctgccacaccctttttgtctaagcacagatgatagaatactgtacacactgttccacatcttgcatttttcactaacaataagttgcatattcgtctctaatggtacaggaagagtttctccattcttcatatagcttcatagattccactgagagatgtacatggtatgtatggttggactattttctattataaatattcatgcaattaatatcctttcatgatatattctacattatatagctgatcaataaatatttggaatatgtttattttgaccaatattgccaaattgctctctatagcgattgtatcaatttattcaacgaacaacatagtaggttgaaccataggcaattacagttttaaaggccagaaaagccaaatgttgacaatttcatgtgattcattctaatatgagagcgtttcacactcttaccaacatgggtattgtcaaatcttttgccaatttgataggtgaaagtgtgtttccttacattgtaatttgctttattttattatgagtgaggtttcagtatttaatgggctcttggtatttcttcctctgtgaattatccaaattctttgccaattttaggcatctttttaatacagttttcactttaaacagctctttaatattaggaaaactggaatattccatcatatgcgaatattttgctcaatctatcctctacccagggaggaaaaagaacggcagcaggagggcctggggcagctgctcacagggcctgtacctgtctgccctgtgcgcagctcatacttaaagggttctgcaggtccccatcaccccagtggcttcccggagggctccaaccacctgaactcacactggtcagaggcagatgaggcagccaggcctgggttttcatatctccttcctgagcctgatactggccaccagcctgtgtggtcttttttttgaggctatgcccagatttgggggggccaaggacctcctcaacaaagctgctggggcccgtgtggagcgcagccgtggaagcctggcctcctgaccatgcaccacttcccatttgcccccagcagaactgcctggggaccccagagagtaaatgggctggtgccaggtagagggtgttgctttcagggcctgggggttgtactgtaggtgcacccgttgcgccagggtggggttattcactgttcaattcttagaatcctgaaatggcttcatctagcagattgagaaaatggcatcatgacagcagtggctgttgcttcaggagaattgcacgtaattcttccttccactgagatttggagaataggggtaaaggagctctctcttccctttaaggggaggcctctaatgcaaacagaactg

SEQ ID NO: 173 - DNA, 22654 bp, Human
  misc_feature (1)...(22654): n = A,T,C or G
cagccttgctagaggcttagtctaattaaatcccctagagcatttaaacaggagccagtgcattggagcacagtgtatattgactgatgcacggagtttcctcattgtcttaggaaagggtatgctcgaacctggtgctgtgtgctaaagaatagtaacagtgagtgcaacaggtgctgctgtctctgaattccaggcctggcttgggttcctgtattggttagctactgctgcataacaaacaatcaccaattcagtggcttaaagcactgaattaaagcatttatccatgctcaaaaatctgagtttgctgggtggttcttctggtcttggctggatttactcatgcctctgtggttacagtgggttgagtaggcagtgccactaatcttggctgggtcctttacatacttgggggacagctggctttgagttgttcaaagatgttgctgttaccacacttaatgaccaaatcaagtcataccatgtctagctcagattcaagaggtggagaaataaactccacttcttgatggaaggagctgcaagatcacattgcaaagggtgtgtgtacaggaggaagggatgaagaactctgaccaccttcccagtccatcaccaagtctagcctgtttctccatcctggggatgcctggaagtagggaggaaacaggtcaagggccaagagggttttcacattttctcttttgactcattctgtgtatccctcttgttctacatggttgacatccagtgaagcttgctgattactagctcaacacaactgaatattcaacaactctgtacagcctgaattcaaatcttacctcatcactcgttagtcgtgtgactttttaggcaatttacttatctctctgtgcctcagttcccacatttataaagagaggcttatgggattgttttaaaacttattaggtaatacacgtaaggtgcttggaattctgactgtacttggtaaggcttcgtaacagttggcagctattctttatgattccaggagtcctttccattttcttaagaggaaggcccttaggcctgcacccttgtgttttggttatttaagattgagaactttgacaccgaggcatatttaacttggcaaggggaggcactcatggtgtttgctttgtgaaggcttatctgccttgctgtgtgaactggctgggctgttcacagatgcagaggtctctggttatatcatgatggctttacagggtccaagaattatctgcaggtgtgcaaccttcagaggacctggggaaactcaacagacatgacatgggcctctgggggctcctgaacccaactattgagattacagtggcataatgcaatcattgctattgttttaaagtgttgtcttttggattggttcattgcatagcaatatataactggaataggcagttaatgggaggattgtggtcagaagctactgtgagggctgttgaatttttctccaaagctcagatgcccagtattcctagtcttcgaaagagagagaggaagattgagagagagagagagagagagagagagaagaagttttcttaatcagagatttctctttactttcaactaattgcaggtattttcatctattctaaatgagaaatactatcctctatcattagggtttgctgctgtgtccctattgagacttgtaaactatttggtgatgaaatagaaaactgaaaagtgagggcccattcagctcacaagtacatgcatagttacataggtacaaggttggtgacttcactccctgctttaaccaagcattctgtcatatttccagacttgtgggaagacttgacagctattattaatcttgttttgtgtatttgggcagattaaagtattaagtgcgcacagcatgggctataatcacctgctgttttcttgaagtagtgtccaaatgataaggctggaatatatatttttagaaagggctggacactcgatccggtgggagggaacatctggaacattagacagggtaagccacctttgcaactcctttccccctgctgtgacgtacaggtgaggtaaacagtactgaagtccagggcgtcggtgctcactgctctggcaatgcccggtgagactgaattatgtttaaatttattgtagatgctgatcttctggacaatcacacttttcctgctgggagcagccaaaggtaagaaacaccactcctgccccgtaggaagggcttaaacttaagctctcagccctggccagagaaagctttaactgtggcagggctcccagcagctccagggtaccagagagaagatgtgggctgacactctgcctgggagagtaggctgggcagtttaagggagacctgtttctggggatccccccagtggcctaccttcatgctcggggtgcccaaggccagacatttctaggtaaagcatgaaacatctgcctgagttaacatattgacttatcaatgcccatgatcacattggtcaaataaatgtatcagaagagctaggaatgggacttagaactttccagttttgagggtagttctaaacaaaggctccagtggtgtccctgtgggattcaatgggactgatactactaccggccagtagtaggtgggcactggggtcaagaagagagtgggaggggttgcagtaggttcatccattgtcttcagactgtccctgaatagaagagtgaccaggcccgaacagcagtgacaccccagagcacaccttgagagcaaatccttgagcagattcaacctttctctgtaggaaaagaagtttgctatgaggacctcgggtgcttttctgacactgagccctggggcgggacagcaatcaggcccctgaaaattctcccctggagccctgagaagatcggcacccgcttcctgctgtacaccaatgaaaacccaaacaactttcaagtgagacctctgtcatttaaatgtcactgtaactggcacggggctatgcccaccctgcagaccatgaataccttatctctgtgccctcttcctccaccatgccccaccccatccctcaagctgccccccagacctagctagacctagacagagcaggtctttagtaatgttggcttgaatgaatgaatggttcacatttgccagaacctctagctactgtgtgattctggtctggggcaaacagcttactgtctaacaaaaaccacagggaaggtaaaacctcaaaccacaatccaggcctagtggaagcagtgattactcacctggagagatggggcaagaaaagggagatcagggtgggcttcatggaagaagtggctttttgctaagctttgaaaagtagaggcattggcgcaggcggagatgaggaaggaaaaaggcctgtgaggctgggctgcgaaaacatgcagcacttctgcgtctgtcacagattctcctcctctctgatccatcaacaattgaggcatcaaattttcaaatggacagaaagacccggttcatcatccatggcttcatagacaaaggagatgagagctgggtgacagacatgtgcaaggtaggagccagctctgatccctgtggccagctgaggccaacacttctgctaacatctctgcatcactttatgcactcaagaaatctttacatattaggtaactttatgcaattaaaatgcttctcttcacaaaaattaaaatgcctttccatgtttccgcactacatctgcacactgaagcaaccacatttgctgttagaaaagtactcctactacctaatttctggttaaaccaaggcctgatgttttctgcttccatttgtagtgagggtactttgtatcctataagcgagggactataggggtttctttgttcaaatttttcccacatccctgagaggctgacatgtgttgctgtgaccacttaattgatcccagcactttgggaggccaaggtggatggatcacctgaggtcaggagttcgagaccagcctggcgaacatggtgaaaccctatctctactaatgatacaaaaatcagcctgttgtggtggcaggctcttgtagtcccagctacttgggaggctgaggcaggaaaattgcttgaacccaggaggcaaaggttgcaatgagccaatattgtgccactacactccagcctgggcaacagagtgagactccatctcaaaaaaaaaaaaaaaagaaaactaagattaagttactacaatgacagaatagaaagtgtcacctacatgtaatataggtcagaaggagagcaacagaagaatacacacatgtgcacacacacacatacatacatggacatgtgtgcaacttgtgcatacacacacaaacacacacacatgtgcgtgcaatataccacaatataccatcatcctttctatttatgtggagactagttcaatcgatttttctgtcacctaagaatttacctaccccaggagcctgccttccacacatacattaataacaccaaccagtaatgtcaaaaggaaaaattacaaacccagaaaattaaagtcattctgcacttgcccttggtttaacaggcatttcactcttggcacctttcctgtcctatcattaataagcatcttattgatacagtttatactccaaattctccaggcttgtgaaagtttcctcaggattgcttgaaaatgaaagtcctggccaggtgcgcagtggctcatgcctgtaatcccagcactttgagaggccgaggcgggtggatcacccgaggtcaggagttcaagaccagcgtagccaacatggtgaaaccctgtctctactaaaagtacaaaaattagccaggtgtggtcgcaggcgcctgtagtcctagctactcaggaggctgaggcaggagaattgcttaaattcggaggcagaggttgcagtgagctgagatcgcgccactgcactccagcctgggcgacagaatgaggctgtctcaaaaaaaaaaaaaaaaaagaaagaaaaaaagaaaagaaaagaaaagtcctgaggagaaaactcccactatctctgtgcatgtgatcacacatattagtatactatatgtggaatgattccaagtgcattttaaatttatagtaccattttaaattcaagctggtaatatgtactgcctggcagaactcctaaagatatatcagctcctttgacatccaggaagacattttccttccagaattcttcaatctcttttaaatcagtacagttctatttttcaaatatctacatgtgtctactccatgaagtactgtgtcatcgtgactataaaaatagtgaaacttctctctcactttccagcagcctggggcatcgccaagagcctgaaaggaccccttacagtcaaatccacaaggtcatttagacactggccaccggagattgcacctaagacttttccttttcaaaacaggactcttttcatgatgcaattgtttttcccttactaaccaaccttactgaatttggttgaaggaaaccagagagtagccagcttccaattaatctgcaagctggagggggaatcagtttgcctttctcatagcattcaccctgaaggataactcctaattaccaacaggattccctaacagagtctagtttatctcatgccctagctaggagaagagagaagtggccatttctgagccctggctggataaggtttcccctgctcccattatctccccaaccccactatctccccaacaccagaaactgttcgaggtggaggaggtgaactgcatctgcgtggactggaagaagggctcccaagccacctacacacaggctgccaacaacgtgcgagtggtgggcgcccaggtggcccagatgctcgacatcctcttggtgagtcagctggctggcctatgtgaggagggaagcagtgcctgctggtctctgtttggtagagatgcagctgagagttatggattaaagaaggacaaagaattgatatccagaccttacttctaaaactctgaaatttgccttcataatgacacgccagtggaagcaaaaataagaatcgctaacacttagaaagtggttttttaaaaatcatcttcaatttacagataaagaaactgaggcccagaaagtttaactagtttgctcccaaagtcataaagcaaatgaatagaagacctgccttttgatccagaccatctagcttcagaattcacccacaacaccaggtgggctctgtttcgcgtgaaacacagcatggccagagagagccacagagagccaacggacagtacgtgcaattggcatgtaccagctctactggcctggtggtatgggtcctattgatgttggggaattccttctgccacaatcatttcacttatttcttcctatactgtttcattatagctaactccttcagtctttaattctttaagttgctaatcctttgtgactattttctataccaggtaatgactacagccatttctgtcttatagttaaagggtctacaaaagaatcaacttctgcactcctgcagaaatcaaaacccatggtatttgtgcaagaagtatgatagaccaataaatgaagtgcctttgggtgaacgtctctgagatcaacatgtgcaaatacctcatagctctatttgatttgcttgttcaccagtacttttggagcagaatgtcaggagtatgtgaggaagtaaagaagacacatgagatcccagaccatcaaggagcttgcagtgaaaacttgcaatgccagtagagtgcgatctattagtgggttctgatggggagagtaggagctttacaggaacacatagaaggcagctaatccacactgatggggtggggaaagggcttaaggaggtctcccaaggaagagacgtctaaattgacagctgaaggctagtctgttgatgttagctggcaagtgcttgggggatagacaacaacaagaagagaagaacaaaccaggcccagaggtgagaggctatgatgtattcgagggtctgaaagttcaacaaagggtttggctgaagagtctagaaaaatagatgatgagttaggaaagctcggaggccttcagaatgagtttgggcttgatcctgaaggcaatgagaggcatggaaggttttcagcagaggagtaatatccattaggctggcattttagaaaaaccacagcaaaaaatgtcctgaaaatacaatcttccctctccagacagagtatagctaccccccttccaaagttcacctcattggccacagcctgggagcccacgtggctggagaggcaggaagcaagactccaggcctgagcaggattacaggtaaggccccagaggcagggccccagttttgtccccagaaaccccagaatgaggtctcaagaatgcagcccagttcagagctcccctgaaggagactgtcccccttggctgtgatagagctgcttggagcctgcacagaacattttagggagcccccaagaagctcatgcgccaccttcacggcaagggaagggtgattttgttcctctttgcttcttccacctctgtcctagcccctcctttctaagtcctggttttctggtggtgttcgcctctcaacaggactgggcacccaggaaaatgcagagtgagactagtatgaacatgagcaaaacataatcaaggagggtctatattgccaattctttctcccttctctttgaaatcaagggcagaatagaacctaaaaattgtttcccactgcttctactagtagaagaaacccagtcgccattatggccaaaagcattcttttaacccaatcaaagcatttgaattataacagcaacagcaagatatatctacataatatgatggtgataataataataataatgctattataattattatgataagcatagattaagtgcctgcttatcccaaatactgcacaaaatgctttatattttcttatataattctcagaactgaagaaaaaggctcagggatgcaaataacttgcccaaagccacacaactcatcagtgggagaactgagatccagacctggttttgccgatgtttggcttaagcaactctttataagaaatctctcttttattttcagctggcaactacattcacgttcctattttatcagctgctgtaatgaagccttcaaaaactattaacaaatccaagatccctactaagaaggaaatttgtcaaaaacaataattattaatatcttacttatacacccatgactatacaccaggcattgtgctaagtgctacctattaactcatttaatctataacaaccatatcaaatagatgccattatcaccccattttgtaaaatgaagaacctgaagcacaaaaaggtagagtgacatgctcaaggtcatgcatcttgccccaaaagcagctgagtaggaatttggagccaggcaacctagacccagaacctgtgttcttaactatgataccacattgcttcacccctttctttctacaagcttggggagagaaaggatgatgaagaagaaagatacacaagtaaatgggagactctggtgtggaaaaaatccttgcttaaacaaaatctaaatttctttgctcatttgtcctcctccatccacgccactgggaacccttttgcaatgagccacattcagactctatgtcctcatatttagcacccaaggccatggcactgcatcactctggtgcatggtacccattgagttgggcagtgcatagcccgggcagctgtacaccttggtgctgctgacatctacagtcaggtctattgttctgcagtgctgatcatctcttttagggttggatcctgtagaagcaagtttcgagagtactcctgaagaggtgcgacttgatccctctgatgctgactttgttgatgtgattcacacggatgcagctcccctgatcccattcttgggtgagacctatgatgctccagctgtgagcatgcacaactgtgttttaaccatgaaagtcctgcatgacaaaaagctcattgtttttctaagcatttcaggttttggaacgaaccaacagatgggtcatcttgacttcttccccaatggaggagagagcatgccgggatgcaagaagaatgccctgtctcagatcgtggatctagatggcatctgggcgggtaaagtcatggtggggtgaggggagcagggcgggtactttcctggagtgaccaatacctttctgcagcaaatcttaagaataaaaatgaaactgtctttaaaaatatacaattccctcttctggggattatttcagaaaaaatgtagctacatagtatttgttatatctcagctttactgcttttgtgcttccttaaaacattgctgtggatgtcctggcatgtacaagcaacaaagaattataaaactgtcacttaaagctgtgactccagcaatcagttggtagttacctaatacagaaaggaaataccataagagcaaacatcctgactgtaactaagagacttttgctacaaattctctcttgggagtcagtgataaggttcaaaatgatgtaatcagctccctttcagtagctagaatgagaatattcccagtggtttccacagcaagcctatttgcacaatgagagccattgctcacccatgttgagtaggaatgaggagcaatcacagttaaggaaggtgagatgggagactgctattggatgtggttattctttattgttgatctagcacacttgggaagaaagggcatcctgcagacacagctctgactctgtatctaatgaggccaaaaggacaatggacaggtgaagttttcatccagacttgtcatgtggcaccacacggagaaaacccttagtagtctgaccaaatgtaatgagtaaagatttttactgaatttcatcaaaatggcttggcatatatggatgccatcaaagcaaatattaagaatgaggacaggccagctgtggtggctcacgcctataatcccagcactttgggaggccgaggcgggcaaatcacttgaggtcaggagtttgagaccagcttggccaacatggtaaaaccccgtctctactaaaaatacaaaaagtagccagtcgtggtggtgtgtggctgcaattccagctgctcgagaggctgagtcaggagaatcgcttgaacccaggaggcaaaggttgcagtgagccgagaccatgccattgcaccacagcctgggcaacaagagcgaaactccatctcgaaaataaaataaaataaaataaaataaaataaaataaaataaaaaataaagaatgaggacatatgcagtttgtctttcacagcctcatgagggtttgcgtgcatagggcagtcaaaactcttcatcagtaatggcccagcaagctcaggccaggtctagaaggtataatgtaacatttgtcacttggcaggagttgcagggagcccagaaaggttgcaagtaaaatcaagacactatgagagtgaagctcatacaaaaccacctaaagttatccagcccttgtttttatttgtataactgccgcatggaaatgtcctcgcattggcttggtcatgtcacatctggtcatgtctttgaggacctccagcatggtgcctgggacatgagatggcactaaggttagagggatgggccgaagacaagatgggcatgggtttaattaccagctttcccacctattagctaagctgtaaatctgaggctacactctgtagtcctttctgtaacataggaatgagatgataatgcataaataaggatgatatggtacccacctcctaggaagactgaggattacatggacaaggcaggtaaagtgatcagaatgttgccttgtacacagaaagcaccctctatatgttaattgtcattatggtggctgaattttggatttatcttaagtttctgaaaatacggtcctactttggaaccatcccatttggagagagaggcagagaagctgttacaggcccccaaccacctgttcaggtctccttattcgttttcccaggaacccgggactttgtggcttgcaatcacctaagaagctacaagtattacttggaaagcatcctcaatcccgatgggtttgctgcatatccctgcacttcctacaagtcctttgagtctgtaagctattgtcctgcctcgagcaacaagcatcacccctctgagggactgctgtcctgctgcgtttgggatttgcaatgccttctcactacacgttttgcattgaccctcagagttcatggtcctgtggagtggaagagaaaaaaaagtaaacaacttttggcaggagatggctaaaattttagatgacatgagttatgtggcagaggaaaactgggaaatcagagagaaagagcagtcaattcaatgatatagaggcttcctgcaggaggcaacctctgaatctagcttaaaaatgatacagtttagaaaacacaggaatgcacatttctggcaagggcagagcgagagtagaagaatgtatagagaataattcacaccagagagaaagcaaggtggatgctggagtcctatatgccaggctggcaacaaggggagagatgaagaatgacaggttagagcctgcctattctggctcacgagagccagcatgagtatcccttcccaactccaaattcagagacatcatgttggtagcctgaaactggccacagtcagagtatttacaccactgaaaatggtaagcactgcaatccagggtttttgtcccagagcttttgctgcttatcattcaccagctccactcaacagaaggtataattgatctaacctgggtcctgggcatcagtattttttaaagctcctcaaataattctaatgtgttgtgcctaaaagttgggaaccctgatccagatgaaggtaatttagagatcatctgctccaacccctttgttgtcacaaaggagaacgcttaggctgtaggaaaattgagtgtctgccctctcagatgtatcgatcatacaaacacaaattctccttacagtcccatctatctcttctcattaggacaagtgcttcccgtgtccagatcaaggatgcccacagatgggtcactatgctgataaatttgctggcaggacaagtgaagagcagcagaaattcttcttgaacacaggagaggctagcaatttcgctcgtaagttgcactttgactacctgcccatgtaaagaaagtatatagtttctgttacaaatgaggggcttgctttcaacctgaaatatttgtgggtacattttaattatcttagaaatggacacatttaccgaaactattgcagttacaagtaaactgaggatttagacagagtgtgcatttcttccgttctatttctgcggcatgaaatgagagcaagcaactagtataattaatgggatgaggccagtttgcacatccttgtgaccagctaccctgaatttttaccactccacagttcattgtttctttcctttttaaggccgcatcagacacacctgttctcttcattcagcaaagacgtaattggtaccagctctttgctgggctatgtcccttaagaagcccaactccattctctgctttcccctctgtctgtgcatccctgatgcccaggggctgcctcgctggtggagtgcaggcaggaatcagggggaaggatgatttctctccaaaacctgctgaatggactaagacacagggtagagactgggcatgtttgggccactttgtaccaacctgccccatgacagttccataggaggtgacccagtaaagacagaggttacatattcatataaatgtataacacatcttacatagtttttaaagtcagatttattgaggtataatttatatttggcaaaatgcacgctgtttagcatacacttgtatgagtttggacaaatgaatagttgtgtaaacacctccaaatcaagatacagaacacttctatcaccatatatatcactctgtaatttttttttttttttttgagacggagtctcgctctgtcgcccaggctggagtgcagtggcgcaatcttggctcactacaacctccccctcccgggttcacgccattctcctgcctcagcctcccgagtagctgggactacaggcgcccgccaccatgccaggctaattttttttttacatttttagtagagacggggtttcaccatgttagccaggatggtctcgatctcctgaccttgtgatccgcctgcctcggcctcccaaagtgccgggattacaggcgtgagccaccgcgcccggcccactctgtgtattttttttgtaagaagacattgattaatcaatccttccactgatgttgtgatgcatgaaatacttgccaatatttcaacaacaaattaaacactcaaaaaccaggtattcattcctcaatcaacatttatttatgggccacagactatgctagacactgaggatgcagggacgaacaagagactcctctcatgaaattaataatccagccaaagacagaaactgggcaagcaactacaagcgtgttgggcttggtggctgttgccatgacattatgggacagagaacctggccctgaccagaaggagggtcagggtcaaggtctctgaagacacgaaagatgaataggagttaggcaagaatcatgtctgtgtatattaatgtacatctgtgcacatgtgtgggtgtatgaatgcatgtgtgagtgtgtttgtgtatgtacctttgtgtgtatgcatgtgtttatatacgtatgtatatgagtctgtatgtttatgtatatgtatgtgcatgtgtatgtatatttgtatgtgggtgtctatgtatgtgcgtggttatatgtgtgtaggtttgtgtgtgtgtgcacatacacatgcatgtttgtgtagatgtatttgtgtgtgtgcacatgcacatgttgtgtatatgtatttgtgtatgtgcacgcacatgcatgtttgtgtatatgtattgtgtgtgcacatgcatatgtttgtgtatatgtatttgtgtgtgtgcacgcacatgcatatgtttgtgtatatgtatttgtatttgtgtgcgtgtgcatgcaggccctgggacagcatttcaggtagaagcctaagtgacagctgctcgtgcacctgctctgtgctagagactgcccagggccctggggagcagagaggaaacacagtccccgccctcgaggtgcttgccaggctgcactcccgagctaccttcccaaatgtggagacaagcccctattccctctctcttcaccttaccttactgtactgccattctggggcagagctggctaacagaactttctgcaatgaggggcatattctgtgtagccattagcctcatgtggcaacttaacatttgcaacacagctaatgagtttgagaaactaaatttttaattgtatttaatttggatttaaatgtaagcagccacatgtggctggtgacctcctccctgggcaatgcagttctagagggggatactgctaaatacatacttctccataaggccttgtttgatttgtagattaacaaatagaatttcttatactttggctgggcgtggtggctcacgcctgtattcccatcactttgggaggcggacacgggcggatcacttgaggtcaggagttggagaccagcttgaccaacatggcgaaactctgtctctactaaaaatacaaaaattagccaggcgtgatggtgtgtgcctgtagtcccagctactagggaggttgaggcagaagaattacttgaacctgggaggcagaggtggcagtgagccaagattgcaccactacactccagcctgggtgacagagtgagaccccatctcaaaaaataataataataattttttagaaaagaatttcttatgctttgttgcctcagagtaagagaaggagacaagtctgggatgtaggctacttattttgtgtgtgaataaattgaactcttccatctcctgtgcaggctggagatatggggtttccatcacactgtctggaagaacagccactggtcagatcaaagttgctttgtttggaaataagggaaacactcaccagtacagcatcttcaggtaatttcctattttaacactacgtctcatttgatgatatacacagccttcaaaccacacacttaatttgaacacttatcatctctttatatgtccactggtttttaattatagtcatgcaacatgtaacaacattttagttgatggaccacatacacaacagttgctttataagcttgtaataccatatttttactgtactttttctatgtttgggtgtttagatacacaaatacttaccattgtgttccagttgtctacagaactcaatacagtaacatgtagtacaggtttgtaacctaggagcaataggctgtaccatacagcctaggtatgtagtaggctgtgccatctacgtttgtgtgagtacatgctatgatgtccacacaatgattaaattacctaaggacacatttctcagaacatatctccattgttaagcaacgcaggactatataactttatgtactgatgttaattgcagacttctgctaataatttttcttttctgttataaacctaggcatttcgtcctttctctctcttttttttttttttttttttttttgagaaagagtctttgctctgtcacccaggctggagtgcagtggcacgatcttggctcattgcaacctccgcctcccgggttcaagaaattctcgtgcctcagcctcccaagtagctgagattacaggcatgtgccaccacacctggctgatttttgtatttttagtagagatggggggcgttttgccatgttggccaggctggtctcgaacttctgacctcaagtgatccacccatctcggcctctcaaagtgctgggattacagacgtgagccaccatgcccggcctctttctcttaatagatgtttttttaaacataaatctaatattacttcagatatgctgttttctgattagtgcaataacacatgcttattgtgccatactatgtggccaatttgttactgtacaaataattcttccaaaacatataaaatgatatgcaggaattctattttattttctattagaaagctttaaggaaaaattaacttgagttttaaaaaccatagtttgaggtgctagcatatagctggcttttccatttctccatcctttatttggaaattaattcggaaaaataatcctgttaatctagaatagaaaacagcagcctggcattgtatggtaattagaactcatttccgtgaacagggatgtttatgtttctctatttcaagggggattctcaaaccaggctcaacccattcctatgagtttgatgcaaagctggatgttggaacaattgagaaagtcaagtttctttggaataacaatgtgataaatccaaccctccccaaagtgggtgccaccaagatcactgtgcaaaagggagaagagaagacagtgtatgtatctttgctggctggtgcctaaaaatgtttgcagagattcatgttataatgaaaacccaccctagaaagttacgtgtagttaagcaagaaaagccaagaaaatttacccatctgtggccccttctccccaaacaagcaactgacaaacagcataaaatgtttctgttgggtgcaccttattgggtgttctcagcactgcctgtgggaatacagaagataaggctgcactttcaaggtaaaatgagaaaatacaagaaagagaacaagaaatcctttctgaagggtacaagtttataagtatgggctagtgaatagctatacttgaaagaggagaagaccaattacatttcaggataataaaacggaaaataaatcggttttaggaaaagatcgaaaattttacataggacaagaatgcactaggattgcaatacttgtgagatcctgacctgtggtctccctggctttgggcctgaataagcacagggccgtgggtaggaaaaagggacagctggaggaaagttggagtggtgacctgagagggcagagcgactgtctctcaaacctcagaccccaagtctggctagtagaacatgtggctttgtgggaaggagatcctgggctctcagccaccgatgttcttgaagtttggggttaggtggagtcaccgagttcaggtcccagagattgtcactcccccaggtggggagggtggggtggcagagtagaatgggggctgactccacatctgggtctcctcgaactggatgacttagtgaggttctccttatccccacgaggcaaggagaacaaagaggttggccctgccaggtggtgggtggaaccaggaggcctcataagctagagcatagtacagaggaggctgggccgggctggtcgggagccctgtgcaagctggaggtgcaaccaaatcctttcctccctgaccccatcagaggatactcagcctctaaattcagctccccaaggccccattagcaagcatcccatggcctggatcctgggactgtgtggttaaaaacatgtcaggtggtggcatcattggaatcttaaaaattagaggtgttcccaggagatgacttgctcacaggtaaggcatacaagtccaaatcagccagggcattgcatcttccaggttttctgaggaaaggctgaggctttctgaactttctgcaaatggaacagaacatacttaaggctgcacctgaggtcctgtgcccatcagctgtcacctgcattccagtggctgagtgcagctcccctcgctgtctgctccagaaagactctttcttaagagcagctggatataagacatcaggttttctaaacagaggaaagtcaaaacagcttcaaatctctcaaactagtttgggaagtaaaaacactgaattagttgaattactcaaacattttcctgttatgaaaatggccagtaacatttaataataataataataataataataatgaagaagctaaagaaaatcaagattttggtccaagctcttctcagaatcccctcatattttttagtaacctcattggggtttcaattcctactaaggaatctgccgactaggattccctccaatgacacagtatccaaagagaaaggcagccctccccctctttatttctccgtccccctctctttattaagtacctttggtaaatgtacccttgcaaatgactttattcagtacctattgtatggcctggcaaacagtaagggatgcaaacactgagcctacactcaaggagcttacagttcagctgttgagaaaaatcagacttatggttcacagggaaggtcaaaagaccaaataaagaactcccaggagaggctcataaagacagtgnnnnnnnnnnnnnnnnnnnntaataataataataataataataataataataataataatgaagaagctaaagaaaatcaagattttggtccaagctcttctcagaatcccctcatattttttagtaacctcattggggtttcaattcctactaaggaatctgccgactaggattccctccaatgacacagtatccaaagagaaaggcagccctccccctctttatttctccgtccccctctctttattaagtacctttggtaaatgtacccttgcaaatgactttattcagtacctattgtatggcctggcaaacagtaagggatgcaaacactgagcctacactcaaggagcttacagttcagctgttgagaaaaatcagacttatggttcacagggaaggtcaaaagaccaaataaagaactcccaggagaggctcagaaagacagtggccaaggaggaaagcagagggccgcggggaggctgtgatggaaggaagggcagctctcaggatgaggcagggagtaggagggaggaagggcacaggggcagggcaacaggtccaagtgcatgaggggcgacagggcccaagtgcagggaatatgatcggaggcctccgatgccaagttagggcttcttggcagaaaaaatgaaacacagaagagaaggtgggaaggggccaaggaacaccagtgaggaaatggggcaaagcttccgagctcacaggtggtgaggcctgagagaagtccgtggttcttgaacaaccacaaaaataactgcttacatctgcattgttttttgttaattgtaagactttttacatttaccatcatgggatgttacgttcttatcatggaattctcaacagtcgtgggagaatgactgagatggaatctcgctctgttgcccaggctagagtacagtggcatgatctcagctccactgcaacctccacctcctgggttcaagagattcttgtgcctcagcctcccaagtagctgggattacaggcatgcaccaccacgcccggctaatttttgtatttttagtagagacagggtctcaccatgttggccaggctggtctcaaactcccggcctcaagtgatccacctgcctcgacctcccaaaagtgtggggattacaggcatgagccaccacaccaggccttgccttgctcttttgatactgtgtcattggagggaatcctagtgggcaggttgtttagtaggaattaataccccaataaggttattaaaaaatatgaggggattctgagaaaagcttggaccaaaatcttgattttctttagcttcccagttactaactacatccttcctcagagtcctcagataactagccccgaagcactcaaatgtgggagggaaaggtcatgaggaactccagggaggaacgccaggtcccccgactccagagctggaagacaaggtcaaggaaggcttgatgtgtgatcctaccatggaaaatacagcctctggcatcagatggacctgtttttgcatctttgttattctgctgattaatggagcgccctttgtgcctcagtttcctctcctgtaatgtagaactaatcatcagaccccctcacacatgtgtggtgaggatgcagtttgcataagtgaattaagcagcataattggctgcagatgagaagggctcagggcgtgttggccgctgtccccttccgagagtgactggaagacagcatccctctgtaagccaggctgctgggcctatggaggccgccaggcgcctgtggggacaaggaggtgagagtccctgccttcggaggccaccgtcctgtgtgacactccagaaccatagcagaccttgtcctagagcctccaggcagcaagcgctgtaggcgctggttgcagctccagccctagtgccccctcgtgcctcctgaatcactcatcaactgtgacctgggcttaaccccttaagaaaaaccaaaccaaaccaaaccaaaccaaaacaaaacaaaacacctggcttttgctaaggtgacccaaactcttacaaagcttccttttctccccaggtacaacttctgtagcgaagacacagtgcgggaagacacgctgctcaccctcacgccctgctaagctcccggggcgacgaggctgctgcgttcacactaataaaatccactggtgcatctgtatgctctgggtctatctcctgccgcggccgcctcccggggatacatttgggaatggaacgtttgcaaatgtcccgagcacgtccccatacctgggtttctccccgttaactttgggtcacacggtttccctggctcctgtgcgtaggtcgactgtcttctccgtgcctgagctggtggcgatggactgaactccggagcctcagctcagggataccagcctttagccccgtccctcacttcacagggaggaaactgaggcccagaggagcaggtagctgttcaaactcactgagtgactcgctgtccccgtcaggtcggagggccgggccccggacccctatttcaaggaccctccctgactcaccgagaccaccccgagggatcgcggcaggcccgggaggaccagcctctctgaggaggtagatttgagggtgaggggacccctcgttggccctggctcttggggaggtgcgcagaggcgggcacaggtgcagggcgctcccgggcttccttcccgctcccctgggtcgaggcggcctcgcggccacctaagcacagagcggcgcggaggcggggcccagggcgggccctgctgaaacgggcttttccgtcagccaatcggctggggccccgaggagcctcctcccccccccacccgccagtctggcgtccccatgggcccaacccatagagacctgggaggagcgggcgttctttcaggaggcgtttctgccccgcggtgtcccaagtcaccactccccccagggagtctctctgtggttcaccaagccccgcatcctaccccggcagtcctggtgccaacttctttttctcttttttcttttttttttgagacggagtttcgctctgtcgcccaggctggagtgcagtggcgcgattctcggctccctccaagctccgcctcccgggtccacgccattctcctgcctcagcctcccgagtagctgggactacaggcgcccgccaccactcccggctaagtttttttgtatttttagtagagacggggtttcaccgcgttagctaggatggtctcgatctcttgacttcgtgatccgcatgcctcggcctcccaaagtgctgggattacaggcgtgagccaccgcgcccggccaccgacttctgtttctaacctgcgtggccacgtcaagctatcattgaacttaagacttgaatgcgagtgggcttcgattatccctccaaagcagggtcgtggcgaggatcaaaggagcgaccttaggaggggccttacaggacagggtgcaaggcgagtgctcggtaaaccgcggtgatgacgagggtgataaagacggcggcggccagggacacccaccccttgggtggtggcaccaagtgggagacagccaaaccctctggttctctgtcagtttcagcagcatccgcagtgagcccacaccccaggcaaagaactcaatcaatggaacgtagattcgccaaacatttatcaaataccagctctgtacccacccctgtgccaggcattggcaggagaggaaatcagaagacatgctgccctcaggcagtgcttggtgttagggaggctgcccctgaaaaagcactgtgatgctgcctactaggtacaaaaagcaaggtaggtcccaggccagggaatttcagaaggaaggagcaagacaagaaggctccacagagatggtggttacaggaccaggcttgaaggaagatgtcctaccaagaccgcagcctggcaggccagctaggaggaggcggcatctgccaatacccagaattgataaggaccatctgagggtagtgactggaaccaaggtataagggagggggtgtggctggttggccatgggtgagagccctactccctggtcaaggacagtctgtctcaccatgcttcccagactgacagctatgggtgtgatgacttgggaaaaacaattttaaaataggaaggaaactgagaagagagaaactggagagaggaagcca

SEQ ID NO: 174 - DNA, 10456 bp, Human
ctgcttcttcaggtggctgcaaggacccaaggcagcttaggtaggagcagagctgaggaacttgttcctctaagatgccaaaggccctcccagagcctcacagtgcgcctctttctctggccccacaggctctcactgacctatgaacgactctttggtaccacagtgacattcaagtgagtcctgggggtggttgaggtatgggtgggctggtgtggccccagcctccccagctcacctgacatccctgccaccttccccaggttcattctggccaaccgcctctacccagtgtctgcccggcactggtttaccatggagcgcctcgaagtccacagcaatggctccgtcgcctacttcaatgcttcccaggtcacagggcccagcatctactccttccactgcgagtatgtcagcagcctgagcaagaagggtagtctcctcgtggcccgcacgcagccctctccctggcagatgatgcttcaggacttccaggtatggagcgggcgtggcccagcttcaggtgggggagcccaggctagtggttgagagacgaagagaggcttgggcttgggcatgtagttgagagtcctgtccctgcgctgcccctgtcccagttcttgctgggcctcccaacggtcctttctgacccgtgtctgtgtgtctgccagatccaggctttcaacgtaatgggggagcagttctcctacgccagcgactgtgccagcttcttctcccccggcatctggatggggctgctcacctccctgttcatgctcttcatcttcacctatggcctgcacatgatcctcagcctcaagaccatggatcgctttgatgaccacaagggccccactatttctttgacccagattgtgtgaccctgtgccagtgggggggttgagggtgggacggtgtccgtgttgttgctttcccaccctgcagcgcactggactgaagagcttccctcttcctactgcagcatgaactgcaagctcccctcagcccatcttgctccctcttcagcccgctgaggagctttcttgggctgcccccatctctcccaacaaggtgtacatattctgcgtagatgctagaccaaccagcttcccagggttcgtcgctgtgaggcgtaagggacatgaattctagggtctcctttctccttatttattcttgtggctacatcatccctggctgtggatagtgcttttgtgtagcaaatgctccctccttaaggttatagggctccctgagtttgggagtgtggaagtactacttaactgtctgtcctgcttggctgtcgttatcgttttctggtgatgttgtgctaacaataagaagtacacgggtttatttctgtggcctgagaaggaagggacctccacgacaggtgggctgggtgcgatcgccggctgtttggcatgttcccaccgggagtgccgggcaggagcatggggtgcttggttgtttccttcctaataaaataaacgcgggtcgccatgcgttgggcctcttgtcgctcatttctgcgctgggctttaggcgcgtgctcgccggagggatgcgggaggatggagcctggcgagggggaggcgaagaggcatccgcggagaccgggaggggctttagcaagctgggccctaaccgctcagggtagggaggggcggtcgggccgagtcccggtgcgcttcggcgtctcaggaggccgtcgtgacaatggcagccttcgcgtcgtgagggggccgccccaggctgccgcagcggcgcgcgcccggccgcggggccgcgccgagactcccgggggggtgggcgggggtggggaggtgggcgggcgcgcgcggggcggggcggggcggggcgcggcgggtggggcggggcgcgcgcggctcccgcgacggattcttcctgggccgcagcaccggccgccggcccgccccgcccgccccgccccgcgcctctctagactctcggcgagcagcgtcgcccgcggagccgcgctggtgctgtggcccgggccctggcagccctcccgggaggcgagccggggaggcggtggcccctgccggttgcggcggggcgcgggaagaggcgggactctttgacgcggcggaggggtcgggcgacggccgacgcgccgccatctttggtccagtgcggtggcggcggcggcggtggcggcggcgactgctgcggtgaaggaggaggaggagccgagcgggcgctggcaccgaggcctgaccatggacgaggaatacgatgtgatcgtgctggggaccggtctcaccgtaagtgcggccccggcgcccctggccctgcgtcgtgccctcgccatcccccgcgatgatgcggccgccggcccatcctctggtcactgccatcttctgcgctccgctccccgaaaagccggcgccgtgcccaccccgctgctcccccagcgacgtcgcctctgctcgttgccatgaccccatctccccgaagaggcccccttcctggccgcctcctgggctacccgggtccgacccccggcgccctcccatcttccctacccctgcccgctggaccggaaaacgcacccccactcggcccgatgcccacgaccccgcccacccatcgcccccacccatcacggcatccacccgtcgcccgcacccattgcccgcctagcgttgcctctcagcgtcccttcccatcttgcgctaatcccggtggggatgaagtagaaggacctggggtcagggggcctcgccagagtgggccctcagcccgcctcctcatcgtcttctggggccaggggatccagggaatgttccagaaggaacagcagtgggggcagtaagcacattcccgcaaccccacctcggttgcccatggagacctcaggctgggtagcatctgcagcctttgtccttgggctagtgacagtgactggtgagggtgtttatcttccccctttccccgaaaaccccgttggcctactcccctcagagactcttcttcctcggtccaggcccagatgcccctcctcagcggcaggggctcctgctatttgaagaaagagcagtccagggtggggcctacaatttcaaggactgtgctaagcctttcttttcctccctttcgagtgtcctttgcagtccagctgggtcttctctgtgccttattgtgttttatccgcctttttgtgcggctctgcgtaggtagatgcctctcggcgtgttggtactggaaggccatcctgtgtctgctggatgccctgcctccctcaaagcctccgttatttcactctccgccttgtgagggggacgggactcctttgcccagcaaggttgcaatggagagtgtggtcggatgaagccatcaccccaattttaggcgaggcaactagccagtggggatggtgggtggaaggagctgtccactgaggcaggtttgggtggggaacaaatcaggtctgctggtaggagcggaggcaggtgggagtgcagcggatggtgtcaccctcccccaggaatgcatcctgtcgggcatcatgtctgtgaacgggaagaaggtgctgcacatggaccggaacccctactacgggggcgagagctcctccatcacacccctggaggaggtgaggctgcccaggcccaagcctatccctgttaacctcccacatagcggcacagggtggaagtagctccccaggtgcctggagcaggaggaggtggtccctgaggtgtctctctctctcccttctgcttacagctgtataagcgttttcagttgctggaggggccccctgagtcgatgggccgaggccgagactggaatgttgacctgattcccaaattcctcatggctaacggtgagggacaggaaggaggtattgcaggtcgggggtgatagggaagacccgaggacggtcaggctccagaggaggcacggccagaccagctagagcctctggagagagccgtgctgatgttgcccttgtgcacccccacagggcagctggtaaagatgctactgtatacagaggtgactcgctacctggacttcaaggtggtggagggcagctttgtctacaaggggggcaagatctacaaagtgccgtccactgagactgaggccttggcttccagtgagtgtgggccccctgagccagagaaatcatggggtggcagggaagccaactgtctttgggatgggtggctgtccagaataaggcacccccttgtccaaagtcacatttcccgtgaaggaccagagaggcccttcactctgtattccctctgccccatgtcatgctgcacggctggctgccaggagggaggtcctcacacagcagggatgtgatgtggaggggaacggggctccttttgaaagacttgagcctggccaggtgcggtggctcacgcctgtaatcccagcactttgggaggcctaggcgggtggatcacgaggtcaggagttcaagaccagcctggccaacatggtgaaacaccgtctcatctcaaaatacgaaaaattagctgggtgtggtggcatgcacctgtaatcccagctactcgggaggctgaggcaagagaatggtttgcgcccgggaggcggaggttgtggtgagccgagatcacaccactgcactccagcctgggcgatagagggagactccatctcaaaaaaaaaaacaaaaacttgagcctttggcagggcctccactgaatccccgagacatcgccaagtgtctgagccaggaaggcccttagagcccatccaggccaatcccctcttcatccaggtggggaaactgaggctaaaaagggtggagaggttaacctaagatcacaggacagctgggctgtgagtgggggtgcctgccctgctgggatggagagttttgtgctgcattgatgcagaacctcctcccgccgcgttccttagatctgatgggcatgtttgagaaacggcgcttccgcaagttcctggtgtttgtggcaaacttcgatgagaatgaccccaagacctttgagggcgttgacccccagactaccagcatgcgtgacgtctaccggaagtttgatctgggccaggatgtcatcgatttcactggccatgccctggcgctctaccgcactgatgagtgaggggaagctgggtggtggcagccccctcgcccggcccgcccccacccttcccacacctgcctgctgtccccctgccccgcatgtctcttgtactcagccacaggctcacctatcaccctttccatttcccccttgcatttgatcctcatcttccccaggccattcagggtggtgggaagactggcctggtacctgggtgggggtaaatcaggggtgctgctattcccccagctacctggaccagccctgccttgagaccgtcaaccgcatcaagttgtacagtgagtccctggcccggtatggcaagagcccatatttatacccgctctacggcttgggcgagctgccccagggttttgcaaggtgaggacatgggttttttcagttggcatagctgagtaggactagggccaggagtggagatggccgccttgagcattttcttggtagtatttcctcctttccaattcgtgctcttcatttacttcactccatccttgggtgatgagggcacaaccccagtgcactgaagtacagaagtctccacacttgaaaaaacgagtctccacaaatgtgacttgctcagttcccggcagcaccaggactgggcccagggtcccagaaccttgagtcagggcttagctgggagctgacctatctccagagagtccattctggtccctcaggctgtcttggtgcggagcactgatccctcatgccccctcccgctggcccttggcagtgtattctgagcagaagctccagagaggaaagagcccgcggagatggggccagcgttcacggcagtgacagagctgggatgaatcccggcgtctcctacctgctgcctgcctggggcagccttctttgcactttggtggaggaagggtgcagtggaattggtccccgtttctcctgggaggggccttcaccggagctgctctcaccacagattgagtgccatctatggggggacatatatgctgaacaaacctgtggatgacatcatcatggagaacggcaaggtggtgggcgtgaagtctgagggagaggtgagcccttcccgtgcatgcagtgcagtcccatggttgaggcggggcttggtcactttctctgtgctgtcgagtctcctgctgcacagccccaagggtcttggagctgggaactgggggtccagaagtcttcagagtcatgactgtgggtgagaggtctctttcagaggccacatgccatgtctgtggtgcagaaagtgttcttgatcacagtgcctctggggggcgggggggcgggcacccagcccgtgcgtcaaggcccacctatctgagcggcagggtagggccatgcattcaggaggggcagtagtgatggctccgaggaacgtcttgtctgccagagctgcctgcccttgctgtgagcgcagccccacgtctacctaagggagggatgtgacaggggcgaggacttctggtgccttctcaggtggcccgctgcaagcagctgatctgtgaccccagctacatcccggaccgtgtgcggaaggctggccaggttatccgcatcatctgtatccttagccaccccatcaagaacaccaacgacgccaactcctgccaaataatcatcccccagaaccaggtcaacaggaagtcaggtaggccgggcgctggtacagcttcctctagggtgttctctttggggttactctttttctccccatcagtgtgggagctccctgccttacctctctggaaaaaaatttgagccacattgtagccaccacaacttggagccctagggtttgggtggcctggactctttccctctgggagggtggcggcttggatgctacctgctctgcggggctggggaggggcagtcgggccagacttgtgtccagccactggaacccctctctgcgtatggccagcgcctctggcctgagttgacggagctcttcctgtggccagacatctacgtgtgcatgatctcctatgcacacaacgtggcggcccagggcaagtacatagctattgccagcactactgtggagaccacggaccctgaaaaggaggtggagccggctctggagctgttggagcccattgaccagaagtgagggactgggctgagcccaagggggagagggagggagcccagcagctgggcttagggaccaggaagggcatggcccattgtgaggcctgtcccctcccctctgtctgcccctcaggtttgtggctatcagtgacttgtatgagcccattgatgatggttgtgagagccaggtaagcagctcgtcccagccctgggctcctggctgcccgcccaggatacctgtctgactcaccctgggcgctgggctctggctgtttccaggtgttctgttcctgctcctacgatgccaccacacactttgagacaacctgcaacgacatcaaagacatctacaaacgcatggctggcacggcctttgactttgagaacatgaagcgcaaacagaacgacgtctttggagaagctgagcagtgattgtggccgcccccagcccctgctgccccagcctgtgtctgttctcctcgagggctccagcatcctctgcttcccccaccacgttcccatcacccacctcattgatccactgaccaaatccttaaccctagcgatggcttgggagatggggggttggatagcatcctctttcttggcccttccttatcctaggaaaagagggttcctctccttgtgtgtgtctcttccccccacccctaattcttctgctctgtttgggaagacgtggaggaaaaggtgacttctgcccccaccgctcttacccccactgtagtggcctttggagatgcccccacctcccccccaccaactctcgcgtgttggagagaaggggccctcccagcacaaagttgcattcctcccccctaatttattctaatttattaactttgacccaccctttctgagcctgcagccttcccgtgtggcctgagggctgtcgagtgagctgccccagcccctcccagcccttgcccagcctgggggagtggggaaggcttgggcatggccccgttggaggttgatttgctgttttgtttcttgtctttgtgttctgtggtacttgctgagagaaaagaaaagtgagccaagcagaaggaggtgggaaaacggacccaaaccccagtgtgccctgccccatgcctttcctttagtggtgggaaacccttatcttgcaaagtgaatgtgtccccttccccaccctctagtgtatttcacagaaaacaaaacctcccaataaaacggttgaaacctgaatctctggatcttgatggttatctcccaaaagctgggtacctggcagggctttggctgcctgggttggggctctggcttagcttcactctggactgtaaaaggtggcattcttcaccagggaattcctcacccagagcacgctggggccaaattgacttaaagcttaaggctacccagtgagtcgatgctggcaccaggactgcagccctcagtgctcaatgcagggggagtgtggtggagggcgggtgtcaacgtggaggaagcagagggagcgggggtcctggcctctggcttgaaaggagagggcagaggggaccaggggccagcctcggatgggattctaagtgaagcagggagacgggtgccagttttcggcttaatgcgggggaactagggcagccaggggaccagcgttggggtcaccaggaggaattagagggaccggggcccagccttggctcgggttaacgtcgaggcagcgcgaggggctggggaattcagcctccggggtccacaggagccggcggcgggggctggggcgggagtccacgcaggaccaggggcggtctccggcggggcggggcgggcggtggtcacgctccgggccagctggcgcgcggcggggcggggcatccgtgcgtctcctggtggctgacgtcacggcgcgggcgtcagtgactgttcggccgccaccgccgctgccgctgccgctgtcgctgtcgccgccgccgccgcccgccgccgccgccgccgccgccgccgctgccatggctcaatacaagggcgccgcgagcgaggccggccgcgccatgcacctgatgaagaagcgggagaagcagcgcgagcagatggagcagatgaagcagcgcatcgcggaggtgcgagccggggagcctcggagcatgcgcgctgcccaggtcccctggcggccccgcgccacgctccggccctggaagccctggggcggtggccacggagcgcgggcggcgcgccggggcaggcccctggctcgctgacttccagcagggcacacagaagcaagccagcgacagtctcatctgtgaaatgggcctggagccgggcgttctccgaggctgaggccactagctgatgaccggcctccggcaggagggagccgagccagtgtttctgttgggaggcacggcggggacgggcctctcgtcgcctcgcctgggcacccagcgtcctggctctggcccctcggccctcagagccaggcctctgccccctcggccctcagagccaggcctctgccctggtcctatggacaccgggcagggcggttcgtctccccctggagaggcggggaggcctgagccagacctggcaagtccactggccaggaggctccttccagaaccccttgcacctgtgaggcaggcacgaccctcccgggtgccagcggttcacccactgcttccgtgagtggcctgtgatggtggtggtcagggaaggagcgtggaggagcttgatccttttggggagactcactcatcaggactcggggctccaggggagagcaggctcctgcctggggaactggggaagcctggccagaggagccttgaaacaccaagtcctcatgccctggccgcactgtctgagccggggtgcccagcaagcagaaggtgtatttctctgccagccaccttcttgggagaccactggtcagcgagggcttgacatggtaccaagtgggttggggctggggccaaagagaggcctcctgggaagctgttgatgacattctggggcctggagggaggaaaatcactcagggaggggccaggcccctcaaccactctgttcttgtttgccctctcctcataacccttggcttgggtctcggaagcttcagcttaaaggctggagatgaaaaaggccaaaggtcagtagggtcggtggcttcaggctactgagggacctgtgatccccagcaggagacctgaagagccagagcagctcagggatggaaacag

SEQ ID NO: 175 - DNA, 9293 bp, Human
tcactacaacctccacctcctgggttcaagccattttcctgcctcagcctcccgagtagctgggattacaggtgtgcataaccacgcccggctaatttttgtatctttagcagacatggggtttctctatgttggccaggctggtttcaaactcctgacctcagtcgatccacctgccttggcctcctaaagtgctgggattacaggcatgagccaccaggccgggccggcattccagatttttcaggggattagtgcagcaaaggaatcaagaagggatgtaaaggcacagtgtgttctgggtacaataaggacttaggcattgcccagaacaggaggcgaaggagatagaaggagaggcaggagagataggtaaggccagagatcggataagagaggcaggaggttttgttcactctgaaaagggatttgaacttggcaattggggcaacagagacagtgacttcttgcttgagagatgagattggaccttcgaaaattgttctctgccctcgtcataaaggaaataagaggagcacgaagaccagtgagggtgatggtgatctggactgaagtggcagccgccacggagaatatcggatgaatgtgagagagttttggaggtcaaagcaccaatgttggaaactaactggataaacgaggagagcggcgcaggacaggaggaatcgagcctgacttctaccataggggtgactgggcgggtaattcattgaaataaggaagttaggaggaggagcaggtttggacatgctgatcactagagctgccacatccgggcggtaacgaacacctggatctgcagctccagagaagggcctgggtcagatgtcactgaagccctatggtggcggaaaggcgagaaatagtgggttgagattccaagtgcaatccactgcggctcctcgctcgccctccaggtggcagcacaaccctgcgcttccgaagcccgttttctgagccagacactctccacgctctgggtatttcggcttctctctccccacacgccgaccctaggtcgcgcactttctgcctggcagaatttggccgaggatccaaacccggagcagcctccagagagcgtgtcgttcacgcggccagcatatgctcagagacctcagaggctcagagacctcagggctggtggtgtggtcggttgtgaccacttgtccctcggaccggctccaggaaccaacctggggaatgtgtgtaggggaagggcgggatagacagtgcccggagcagggaggcgctgaaagacaggaccaagcagcccggccaccagacccgttgtgggaacggaatttcctggcccccagggccacactcgcgtgggaagcatgtcgcggactctttaaggcgtcatctccctgtctctccgcccccgcctgggacaggccgggacgcccgggacctgacatttggaggctcccaacgtgggagctaaaaatagcagccccgggttactttggggcattgctcctctcccaacccgcgcgccggctcgcgagccgtctcaggccgctggagtttccccggggcaagtacacctggcccgtcctctcctctcagaccccactgtccagacccgcagagtttaagatgcttctgcagcccgggatcctagctggtgggcggagtcctaacacgtgggtgggcggggccttttgttccagggactcttttctcaaaacttcccagtcggaggctggcgggaacccgagaggcgtgtctcgccagccacgcggaggggcgtggcctcattggcccgccccaccaactccagccaaactctaaaccccaggcggagggggcgtggccttctggggtgtgcgggctcctggccaatgggtgctgtgaagggcgtggcccgcgggggcaggagcgaggtggcgggggcttctcgcgtcttttcccccagccccgctccaccagatccgcgggagccccactgctctccgggtccttggcttgtggctgtgggtcccatcgggcccgccctcgcacgtcactccgggacccccgcggcctccgcaggttctgcgctccaggccggagtcagagactccaggatcggttctttcatcttcgccgcccctgcgcgtccagctcttctaagacgagatgccgtcgggcttccaacagataggctccgaagtaggattcatcatgagggggcggggcgggggggcacgggtcccgcttttcttgggctggggtcgcggttggggtcagctgggggtggttcctgcgcaggcgcagggggtgaaggtagggggctggctatttatacccggcctggacaacccgtgactgtgagattccaatcctaccaaaaggcagagtgggtctggagggcctttcggggcacaggcagcaagtggattctgcgagccagggttcacccccttgcctagtaggcggcgcggcgctccggaatcggggacaccctgccctcgatccgactcgggaaagcagatccaggcgggtcttgccctccgggagctgtccgtccgtcttcgctcacgggcagtgtttcgaggaccggaggctctccgtgggcccccacccccactcctggccgccctccaggacgctgaactttcccttggccccatggttggtggaggggcagaggggactgtcagccccccctcccccagctcaggtttccgcttggagacagtctgtgccgccagcgagcggccaccactgccaccgcccctcacactaccttcctgccctcctcccctgggcatggctctcccaggcagaacccctggacggccctccctgcacggaggttagagggggagggcaggccacgacgtagatagagaaggccacccctagatgaccgggatgtcctttctggaacagcacttcttggtcctgttgggggcctcctggagctggctgacagaacccccagaggggagggaagaggacagtggctgatgataataatgcacgtgttaatttatgaaaccagcactgtcaaggatattgttaacatgtgatgttgattttcacaacactctcacagataggtaggcaaggcaggcaacatcacccccatctcacagaggacactcaggttcggggcagggaagtgacttggccaaggtcacacaaatctgagctcttaaggccaagcctgtctcaaggtcacagaagaattttgagacaagttctcaaacatttctctgccttatggacccaaacatccagtttctcctttatgcccaggttgcagttcagctcctgtttacattgagatctttgtgcaattcctaatatggcccagtttccctcacccaacatgttgggtggagcccagtatcttcaggctccagctgggcccgggcccctagcggaaggaaaaaaatcatggttccatgtgacatgctgtgtctttgtgtctgcctgttcaggatggggaaccccctcagcagcgagtgactgggaccctggtccttgctgtgttctctgcggtgcttggctccctgcagtttgggtacaacattggggtcatcaatgcccctcagaaggtgagggcctgcagctggcagggtgggggtacccaaacgaggaggacaggtgtctcgggggtggtggaaaggggacggtctgcaggaaatctgtcctctgctgtcccccaggtgattgaacagagctacaatgagacgtggctggggaggcaggggcctgagggacccagctccatccctccaggcaccctcaccaccctctgggccctctccgtggccatcttttccgtgggcggcatgatttcctccttcctcattggtatcatctctcagtggcttggaaggttcgcagctggagggcaggggtgggggaaacaggaagggagccactgctgggtgccctcaccctcacagcctcactctgtctgcctgccaggaaaagggccatgctggtcaacaatgtcctggcggtgctggggggcagcctcatgggcctggccaatgctgctgcctcctatgaaatgctcatccttggacgattcctcattggcgcctactcaggtactcacgggcaccacagccctgcctagcgccctgttctctttcaccatgcctgggctttcagatgggaatggacacctgccctcagccctctcttcttccctcgcccagggctgacatcagggctggtgcccatgtacgtgggggagattgctcccactcacctgcggggcgccctggggacgctcaaccaactggccattgttatcggcattctgatcgcccaggtgaccggagcaagcctcatgggtgcctgggcagtggttagagtggggctctggagaatatggtgggcttccaaggtaaggcagaagggctgagtgacctgccttctttcccaaccttctcccacaggtgctgggcttggagtccctcctgggcactgccagcctgtggccactgctcctgggcctcacagtgctacctgccctcctgcagctggtcctgctgcccttctgtcccgagagcccccgctacctctacatcatccagaatctcgaggggcctgccagaaagagtaagctctcccgctgcagcctggcccaggcccatgcctccgcctcatcttgctagcacctggcttcctctcaggtcccctcaggcctgaccttcccttctccaggtctgaagcgcctgacaggctgggccgatgtttctggagtgctggctgagctgaaggatgagaagcggaagctggagcgtgagcggccactgtccctgctccagctcctgggcagccgtacccaccggcagcccctgatcattgcggtcgtgctgcagctgagccagcagctctctggcatcaatgctgtatgtgtggagcagcctccaggcagggcacagccccgggagggtagacgagagtggggagcaaaccccctccaccaacacccagggtagggccagcctgttgtggctggagtagaggaaggggcattcctgccatcacttcttcttctcccccacctctaggttttctattattcgaccagcatcttcgagacagcaggggtaggccagcctgcctatgccaccataggagctggtgtggtcaacacagtcttcaccttggtctcggtaactgctcacctctggaatggcccgagccactggcttcacctccctgggtgtcccggaggtcctgctcttggttgccctcacccacgcggcccctcctacttcccgtgcccaaaaggctggggtcaagctccgactctccccgcaggtgttgttggtggagcgggcggggcgccggacgctccatctcctgggcctggcgggcatgtgtggctgtgccatcctgatgactgtggctctgctcctgctggtaaggcctggaggctaggaggggctagcagcccaccccatgggaatggtcctgtgagtctctgtgaccagccagggtcccttcttaacacacatgctttcaatcctggcgccagctccggaccaggactggggctgactggctccagaatctgctgggattgtggtctgctcctgagggatttgggctgcactgggaggcagctgtggcacaactctggcagccaggagggagagcccctgtcaagcctcaggaacaatcattcctaaggacccagctttagagtccagggagagctgaccgtcataagaactgagaggccataacatttcctctgccttgaacccacttgggatagccagcagaatgccagtcaagggcctgctctaacccgggacagcaggccccctacaagctgctgcggagggggttaggtttcacttctctgagttgagggcaagggaagatcagaaaggcctcaactggattctccaccctccctgtctggcccctaggagcgagttccagccatgagctacgtctccattgtggccatctttggcttcgtggcattttttgagattggccctggccccattccttggttcatcgtggccgagctcttcagccagggaccccgcccggcagccatggctgtggctggtttctccaactggacgagcaacttcatcattggcatgggtttccagtatgttgcggtaggtccccccgccccagcctcccacaccgtaggccagaggtgggcatcacacagctagcccacctgcttccccgtcagggactcctccagccacagaccatgggtctttgggtcagtttggtggaccacctgctccacagaatcaaagcaaggaagggagctgacctagattggatagtaactgaggtgtctgaaacgcaccagtggcataacttaccttactccaagaataaaatgatacactttgcattaatactacaaacagctgggactctcctctgagtgcagtaactgaggatggtgaagagggcgaaaactaagagtgtttggggttcagagaatcctcttttcagtgtaaattctcattcctgctcatttcccttgtccctggaggaggcagctgctgtctgccgtccccccagctccctatgaaggcctttagctcctggttgcctgaaactaccccttccctccccacctcactccgtcaacacctctttctccacctgtcccaggaggctatggggccctacgtcttccttctatttgcggtcctcctgctgggcttcttcatcttcaccttcttaagagtacctgaaactcgaggccggacgtttgaccagatctcagctgccttccaccggacaccctctcttttagagcaggaggtgaaacccagcacagaacttgagtatttagggccagatgagaacgactgaggggccaggcaggggtgggagagccagctctctctacccggcccagagaccccttcctttcctctgcagcactttaaccctctcttccctattatttccgggtggaaaagaatccctgcagcctggtagaattgggaagctgggggaagggtggtctgagcaccccctcattcccctcgtgtgactctcttggattatttatgtgttgtggtttggccgtggccatcagggtgggccactctcccctccctcttccttcccccatcccctttcctccccaccttccccagactcagctccagaataccttcttcgctgctagagaagggggattggagggaagacaggtctagactttctcagtgggacaaaccagagcagagagcaggacaggagacaagaaatccagtttcccaccaccttggactcctcccacaatctgggactttcactgaattcttgccacgcagactctgggcaaagggggttctcttttttttttttttttttttttgagacagtctcgctctgtcgcccaggctcgagtgcagtggcgtgatcttgcttcactgcaagctgtctcccaggttcacgccattctcctgcctcagcctccggagtagctgggactacaggcgcatgccaccacacctggctaatttattttgtatttttagtatatacgcggtttcaccatgttagccagaatggtctcgatctcctgacctcgtgatctgcctgcctcagcctcccaaagtgctgggattacaggcgtgagccaccgcgcctggcgaagggagttctctcttgacccctgcagggaaaaggactcacctccctcactgcaggctcagccttccagggcaagagggaacaggaaagtatgtgcccatgtgtggcaagatggaaggacggcaggctcccgcctctaggcttggggctctaccccgatggtttcccaaggctgccaagaaggagccctaactttcttcctctcccttcctggaagggtgctgcatccacaggcttttgaccaactaaggcaaagaggggatttgaaaggctgcctggaaacactgggctgggaggagcctttggatatttttatatacgtttgaaaaggggattgagagaagaaaccaaaggtcggttgtactaaatgtatatatatagatacttctataaagtcactgctgaagacaagcatcctattgtggaggtacttgaggatgggctgagacagggaccataactcttcacccctcttcctccctctgtcctgcctcagctcaaggcctcagaatcttctggatgccattgctcatgcccctactcacatttctactcgttgctttattaatagtaaatgctcaataaattgtagctgccagtgccgggcattgctcttggcatttgcagaatactcactctgtgagggaggtgtcagcccatgtcacagatgggcagtgaaacccatgataggggcactcttcaccagggacacagctggagacatggcagcaaggatgccaggccctgcccacggccccacatcccctcctccccaccttcaacagtgagttactagcgattctccaaaacagaagagatggagaccaagaccacaggaaagcctgtttttgtttttactggaggctcaggtggcacatgacagatcataaaatggcttcagaggtagggggccgggggaaaacaaaaataaacttggggtgggggcaagaaaagcaaccaggaggaggtaagagctggctggttccttctcagcctgagttacgggagggagttgctgtctctgaacagtaaggatggctcccttccttcaacccttgataaggggagggaagaaaaaagaaaaagcaaaaggctgctgctttggtcctcctgagtctcaaggaaaaggtgaaaagctggtgttttgatgtcatgaattatgggaaagggggagcagggtactgggtagggtacaggtcatttggaaaaactggcagatacctgagagagaaaaggaaatggacggattgtgaacaacagcgacttgtcatcgccacccagtacctcaccttcctggccacccacccaactgcaccagccactcaccagatggcagctctgggtgtcctctgagttgagttggaatcactccaggatggtggtggtggggtccccactgttgacaggggctgaggtctaaagaacagcggtggccaattgagacttgttctttttgtttttgagacagagtctcactccaggttggatggagtacagtggcgtgatcttggctcactgcaaactccccctcccagttcaagtgattctcctgccttagcctcccaagtagctgggattacaggcatgtgctaccacgcctggctaatttttgtatctttagtagagacggggtttctccatgttggtcaggctggtcttga

SEQ ID NO: 176 - DNA, 26278 bp, Human
acctcagtccctcaaagtggtgggattacaggtgtgagccactatgcctggccaatttatatctaataaacatattatgcaatattatatatcacatatatattattcttttgggcaatatatatgtatcatataaccatgtcttttgggtcaactttgaagtcctttctttcagagaaagaagtgttaggagggaaagtctgacagataccccctatattagtgaaaggggtggaagctttgtaaacctacagattccctatccccaccccagagattctaatccagtagaagatctggggctgtctccaagaagctacatgtgtaacaggctctccaagtagggtctggttttagaaccactggactaaataatttcaagggctcccaggatggttctgtgacaatactttgtgaaatttctgatctctagcttttcagggtaatgaagggttctggctaatttgctattctttatactggggctttacaccagggtagggagatttactatcaccccacaatttagagaaaaactgctcctataagggaagtggcttgggtcacatacctactaagagagtgagaactggaatccatgttgatgtgactcattcatttacacaacaaagttcctactatatcccaagctttttaaaaatttatgtaaatgtacatgaaatatcttccttatgaaatgtctaatcatatgaatacaagaaaaaatttccttcactctccttctccaacctcacattcctcctcaaggaccatcaactcatttgttcttcaagaaaacattctataaattatatacgtcatgcacaaatcaaataactgtttgattttttaaatcaaacaaactcatgtttaagcctttaaaaacattagattacataacttccttcgccacttaaaaataagtcagtacacatgatcatattattccttttaactgctgcatagcatattacatgtatctgatgtatgtattatgatgtatctgaatctatttgactatttcccattgaacgatatttgggttctttctacaattttgctatcacatgcacaaaaaaatgctaaactaagtatccgtatgcatgatgtgatttctctaagatagttagacatgtaaatatgagttcaaggggatgaatgttctgccccttttctacacagtttcattgtaactacatggagttggggagttggggagaaaataatggcccttatcctacaactctaggctgaactagatgcaaatcctgaaaagtacccttccctggatgttgatgcggaacatgataaaggctagctaatgcctcttatatgagtatttttgtcaccatggcaacatccaacagagctccccatctctttattactggtatcttattttaccgctcccaatgatataatggctctatcttggcggctcccttccgtcagcagctattctagttctcagtcctgattctgaatatatatacatacgtatatatatatatatatatatatatatatacacacacacacatatatatatacacacacacacacacacatatcaacaaatatatatatataaaacaaagtttggattttctgcatgaggactatttgggtggatttttttaatcaagtaatttcaatcatttttctcatatattttatgcatccctattctggtatccggtgaatagtcaggagaggtatgctattctcatacacatatatggaaaagaatgtttgtttcctcccctggaagaagctgtcccaaacttctttgagttttagcagcataggggaaatgatgaatggctcacattcttgtatgaacaacacctgccagcctggagcacagggcatactgcaaatcgatattgaggggaaagaaccagcctgtggagcctgtaagaagtttaagctgcagcctgacagaaagatgggaaactaaaattgcctggtgtttccctgccctgtgtctcgccccctgcaggtcactgggaccctggttttcactgtcatcactgctgtgctgggttccttccagtttggatatgacattggtgtgatcaatgcacctcaacaggcaagtgaaatatgtagaagttctctttttggcaagttctgtcagtgatagatatcatatgttcctcatacacagagataaagggtgtccacgtgggagacacaaggccatcctggcctgtcaggtacgatgtgcactgttccaaagctgataacttggccttgactccctaattaacaatcacgggggaaaaaaaaggaggcaataaataattcttaatctctgactctgctgtttgctgagctcacagaaaactccaggcagaatatcatgtgctgaaggatactttagaaaaaaaaaagaaaaaaagagcttattgcaacattcattcagagatctcagccatacatgaatgaaaagtgccagggaataaggatatgtttcactcaggggacattttttgagcacctgcttatttgcatcaggtactttaacatatgatctccccagctggatcctctcaacaaccttattatgcccatttccagtctacattaaaaccttaagaagccctaaactaaaagagattatggtccttccccctccattcctgtctcccataggtgacccaaagtaaaataatgtaaaactttagaataatattcaagaagctcaacaaagtttggattttctccacgatgactccttgggtgaatttttaatcaagttatttcaaccatttttctcatatatttcgtgcatccctattctggtattcagtgaatacatgggagaggtatgttattctcagctcccacagcccataagtcggggaaccaggacttcattcccctctgctctaactcagactgtgaggtcattgagggcaagactgatgaattgttcctcttcctatcactggtgccaagcacagtagttggcataaagaaggtactcaataaagaggggtgaattaatgaaagacagagaagaggaacctggggaagaggtggcataaagtgaaggtacaaacattttttcggtgccttctgtaagtccattatatttcctctgcttcttttagaacattgagccccaaggaaaatgaaagatactgcagggtgtggatatgtgaaatatgcgctgaccataatccatcacctgaaaagggctgcttcctgctgaaagacgtgctccgattaggtgctacaatcatcaggagtgtggcaggctgagagatccagggcatagtgctgggggtcaagagacaagggtcatatcttttttgtgtgggtgatgacaacacatgccaatttagcaggtttcctggaatttaacatcatttaacaatttaacattcaacatcaccatgacttgattaatagagccccttctctttttgtggaagaccttatcacatcattaattgaaccatccctggccgggcgcagtggctcactcctgtaatcccagcactttgggaggctgaggttggcggatcacctgaggtcgggagttcgagaccagcctgaccaacatggagaaaccctgtctctactaaaaatacaaaattagctgggcgtggtggcacatgcctgtaatcccagctactcgggaggctgagtcaagagaatcacttgaacccgggaggcagaggttgcgatgagctgcaatcgcacattgcacttcagcctgggcaacaagagcaaaactccatctcaaaaaaaaaaaaaaaaaagaaaaaattaaaccatcccctccagtcttagacggaagcttaggctaaggtttcacctccttcaatccaagtcccagagccagagctgaaaacagcgatccccatactggcgtccaggttagtgctctctctctatataggcccttccttttgtatttaaagagctgctgaaacaccattacataagaatgattttttaagcctttttttaatcagctgaatgacatttgggattatttggaaggattttaaaatcacactttcatatggttatgaaaattacacatgcctactgaagacagtattagaaaaaaaaatacccataattatttgctgagaacattttggatatttccttcagcttttttttctatgcatattattcatataaggcagccttctagtgaggcaaatgtttttgttttagttttttgagacaaagtctcactctgtcatccaggctggagattttcacttcaacctctgcctcctgagttcaagcaattctcttgcctcagcctcccaagtagctgagattacaggctccagccacaatgcctggctaatttattgtatctttagtagagacagggttttgccacgttggccaggctggtcttgaactcctgacctcaagtgatctgcccaccttggcctcccaaagtgctagattacaggcatgagctacggcacccagtctgagacaaatgtcttgatcagacttcttttataagaggatgctcaattcttcccctccctcagctggcattaccaaacaggcctttgcccataactagtaacccagagcagctgcattccaggtccttttcagagagtaccctcccagctcactgatgctaaatagtgaccaaatcatcattgagaggaatgacatgggaggaagatggcctcgtcttcctcccatgtcctataattcatctgaattatatgaagcatattacaaaatatggctccatgaaatttagtttccaatgttgtccattctgttacacagttaactctatgaggacccacaggagaaacttcctttgggtctcaataccttctcaagggccactaacttattgttatcttaggaattcatcaataatatacccggttgttttcctctctgccctggtggctaggaagtttactggtaaatctatagctcacttccaacaaagatacaccatctagtgtttgaattctgtatgctaacttgatttttgaccctcatcttaactttcccagtcttttttcttatatccacttttatgattctgttaaaatatgtataagtcaatttaaatcctgctgtgcagaagtaacactagcatgaaaatgtatctttttagcctgcagaatatatatattttttgagacaaggtcttactttctcacccaggctggagtgcagtggctccatcttgactcactgcagcctcaacctcgcaggctcaagcaatcctcccgcttcagccccctccaagtagctgggactacaggcatgtgccaccatgcctgggtaatttttagtattcttcgtagagacagggtttcaccatgttgcccagcctagtctcaaactcctgagctcaagcagtccgcccacctcggcctcccaaagtgctgagattataggtgtgagccaccgcgcctggcctagcctgcagaatagtttcaatttcaatagttgccaatatttaaaactcgaaaaaatttacataaaaactcagatttctgactttctgttaaaaagttaaaggtcatccaacaccagtttcacgtttgcagcttcctcttgctcctctagttccacaatcctgaccattccctattagtcccaaatagtagaaaatgtattttagtcccctagtcatcaaagtattacatgttcccttcatttatttgttcctgcctggttcttgttggcaatgtaatttataacctttcttttataggatatggccaactgtaaacaaatctatccatgtttatatgtatataaaacacataattgagatggtactatttaaacacgtaacaaacactttaaagacaaaaacaaaaatacatagaatgtttgaaatagtaaagctatttttctttatctcctaggtaataatatctcactatagacatgttttgggtgttccactggatgaccgaaaagctatcaacaactatgttatcaacagtacagatgaactgcccacaatctcatactcaatgaacccaaaaccaaccccttgggctgaggaagagactgtggcagctgctcaactaatcaccatgctctggtccctgtctgtatccagctttgcagttggtggaatgactgcatcattctttggtgggtggcttggggacacacttggaaggtaggcaaatttcataaataagcataaacagaaactttcatattttcattttcctaacacttgtttagaaaaatattatctttcttcttgtggaatagctttagagttgttttttcaactcatgaccctatgaggcatatcagtgttagatcaaatcaatgaaaaaagctgttgcgacagtttggttaattgttcagacatttataccaaacatgagttttgtgtgtatttctagataattgctttgatcctctagctttgtaagttataaaatatactaggagaccactacacaaacggttaactcaggaactcagcagaagagactaattagagtttttaacctgggagtccattgtttgcttcaccaaatcacactatgtctcaaacatccagttttccctttttaaattagaatttggcattcggatcagtcaagttcaaaggttcagtcaacatccccaactcccaattgcccaatgtatttgttatgcggtttctggctgctggtactgcttgctatctcaaagccccaaccagagatgaagcaagagatacccccatttatcacttgagtttctgttaggttttttggattaaaaacatcagtggaactcctttaccctcaaattttacttattcatgcaatggactacagctgttaggatttcccaccctatataaagaggagataaaaccagaatatcaaatgattattttttagattttctcctatttgagcccaccttttgtgcattacctttttttctcatgataaaaataatatatgaaaaatttagaaagtgaaaatgcctttaaagatgtaaataacaatttaggcaactagtttaataattctggattataattcacttagtttttcaattcctattataaattataatttttagctctctggttattaaaattctgataactcttcctcttatactggagcttttatataatatgactataagttttcttaactacaatatcatggtaacccaagttttattattatttttatttgaaatggagttttctccaccataaaagacagtggtcaatttcttatattttaatcaacttgctgatgttcagttgaactttaaatacgaatctgtaaaatacggattaataaactgaatttcatcatttaaaaaaattcaaaaataatttcaatgtgtatcaagttggtttaagtagtaaatggagaattctctagattaattatttattgctaaagtaaattatttcctagcaagtgggctcagacaaaaggaaaaaggaaaaataattttaaaaaaaatttttaagtaaatcaaattaagcaaaattaaattacgttctaaaatatgcacaaatcatttagcaactactgatattttatactacttctcattcctgaagaaaaaatgtaaaccctggttgcctctcatttagaggtaagattctgatgagttcagtgacttaacctaaaacatttaattagtgttaacatttaattaacatttaatggagccaatatacaaaccctctgaagtcttaggatttggcatcaacaatggttataccccaaaacaatgtcaaatgaccacgtatcaaatgacctatggtaaacaaaaagtgaggtttctcctagcttttagtaataaaatgatcccccttgaaaagcagcccaaaagtccataacttcaacatcaaaattaagacaaagttatcagtatccccataaaattatctttctagagagattcattgagaagtgacatgattttcattattaccagtgtcatttatctaccagtcaaaagtaaataaataaaaatgtaatacttccattattgcctttaaaaaaaaaagtgtttccttgcaattgtgtaatagtcaacagatgtctgtggccaccattttatagttttgggtttgcaaggccaatttttccaacctatgcatttacagtttaattaccagggtacggtagagaagactatggtctgtgcaatccacactaccatgagtaaaggaagcgatgcatagcttgcctttgaaggcatgcattctttcccatcaaaaatggaactcattaaaatgatacattaccctttggtttcacacagatcaagtccaagatctgtcacttaatagctgtatgaaaatgagcaagttattaggttctctaagacgttttcctcccatctgcaatgtgaaaacaaaaataatacctacctcatggcattattgtgaggatttaatgacaacaaatataaaaggtttaaaacaatgcctgacatttattaagcaaacaccaaatgtggcctcattttgatgatgatgatgatgatgatgatgacgacaatgaccatgaccacgacaataatcgagcctatactatctgaagtatttagagtcagattttaagaaatatgcttacatagaattaagcttctttttccctgattcagctatttcatgtattttttaaagtatttatttgtggccatttctaatatctgaacagaagttaaaagaatttaaattacataaagtgttcctgcatcctttggtggtagggaaaggggactttagggcatcaaagattcttccaggctatttcttttatgactttttatcttttttcccctaataaaagagactattagctaggtggtaacaacttgttaaggtcaattattgaatttgcctgccctctgtccctgtgtagataaaaagcatttcacaatagtctaaactactaaacaccccttaaactatttttctactctgtagctctggggctagccagctctaaatcactctgtttccctatactcatttcacattgctgctgtaatgaattatccccaatttagtggcttaaaacaacacaaatatgttttcttatagttttggaggtcaaaattccaaactcagttttagttagctaaagtcaaaatgccaataaggctggttccttctggaggctttgagggaagaatgcattccttgcccttttccagcttgcagtgaccaactatagttctctggcttgtggccccttcttccatctttgaagcacaacattctaatctctacttctgtcatcatatcacctgctcctcttctaccttactcttatcaggacatttgtgattacatcattggattcactcagataattgaagataatctccccatctcaagattctcaatcacatctgcaaaacctcatttgctatgtgacgtaacatttacagagtctggggattatgctgtaggctgccaggggacatgatttagcctatcacgtggatgttggacaatcactgcagtatgtgactttatagttttatgctccagaaaaaaaaaattctgtttggttggtgttaaagatacttgcatggaaaaggcccacctatcaaagtttgaagcagtgaaatagaatataacaaggacgtttacatttcttttggcacaaacattttcacacctgtctactcaggcatttattggccttaccattatctgcttgactgcaaaaaaggttttctgtgtacctcgctttcccattaattagaaataaaagtaacagatatctgcaaatgttgtcaattttcatctgattaattttgaaagtgtttttgttgctattgtcagctctattatgtattttacattggtcactaataatttatagattttggaaatatgctggcatacaatattaaaatacagataattataattctctagataaggcttaaaagtatgttttaaattacttccaaataatttatacaaaaggaaatttaactttgaaagttcctttcctatctagattaaaaacctgtgccattgaaagaaaaaaaaagttgtaggttacaactatagaattgaatttagctatcaccagacaattattctttaaaacaatcaacttagagaaaacttagttaactctttgaaaaactgtcataagtgttatcttaagcttgtcctcaccaggattgaatcatctctatcaaaatgtagagattaggcttgagcctgggaggtcaagacttcaatgaaccatgatggtgcctttgcactccagcctgagtgacagagcgagtgagaccctgtctcaaaataaaatagaaaaatgtagagatcaggtggatgcaacctaggttatcccatcataagtcttgcttattagtaatactttagtccatagatgagtcaaattagcaatcttggttcaagattccccaactagcttttacagcaaaattaaaataattgctcttaggttaaaaaaaatctcaacatgctctgaaagcgaataattttagcaagttttgatgctgaatttatattccttgctttttaaaatttcagaatcaaagccatgttagtagcaaacattctgtcattagttggagctctcttgatggggttttcaaaattgggaccatctcatatacttataattgctggaagaagcatatcaggactatattgtggtaagtcacacacacacacacacacacacacacacacacacacacctacctttgtctgaaagtaactctaaaggcggatgtggtagcactcagggatatttttgagtctagggtgacatcacagagggaaaggcaatagcataaagttgaaatcctgagttgggaggtttgggaccagtaagtaggaattatgatgctatcaaggttctcgtccatggcaatgacatcatttctagttgtatgatcacagacaaattatttaactctgactctcagttgcttcatttattaaatgaagtggataataatatctaccttatagggtgattgtgagaacatatgtaaaacgttccgcatagaatctgacatacagtaagctaccagtaaatgctagccgttgttattactgctgtggtatagcagacagtgggagactgctataccacgacccttaattctgcccttatggactacctggctgccatgtctccatctcttctatctgacaagaccttaacactctgaacccatctcttagaccacattccccagccctgtatgattctagacatgaccgagtgaagcattacagtggtggtgtccatagggaaagtgaatcagagagaagcagctgatatttaaaagttcagaataaaggaaggaggttcctcccacaaactttattctgaatagtgggaatcgctagttcttggagacagcttttcaaacattcagaggcaactaattagcagacatctgaagaaagggagaatcattcaatctctctctaaaacaaatggctaaatctgtaacttctgccaatgaagctctgattttgacggtgctaggttgagattttaacccattttcacaagacgtagttgcctttcaaggcacctctatccatggggatggggaaggagtggtgaggacgtaagatttgtatataaaagtatttttaacacttttacctacagaaaagacttgaattccatgtatcttcaatgatcagttgaagcaaaagactaaaatatcaagttaacagtctaattaaatctctttttattattttcattgttaataaaaataactgaagatcagtgtagctttatcaaggtaaagagtcaaccccaaatgtggaaagggctttgaattcagagcaaataaattctggcactgtctctgcatggccttaaatattaaatctgagcctcagtttcttctcccataaaatgcagataataacactatgaacgaagtcccaattatgattcttctttcttttctctccatttaaaaaaatacagtgtgaaaaaaatatacaaaatgtttttggtaaaattgaaaacaaatgctataaatatattgtaaaacaacctctaagtagcatagccaaccaacttgtactccctaactatcttctaaaattatgtttggccctattctgagcattaaagttcctaaaaattataggaaatataatttgacttcaagttcatgtgacttcagacctgtgagcttatctacattattctgtttttcaggtatagtattagctattacagaaagatagtacaacttagaattgagccaaataaatgatttttttcttacttaagatcaacaggctacacattaaaagtcacctgtaaaattcagctgaaatacagataccttatcacacatgtaaatgttcatttgagacattaagaacaatttgaagcattaaaaaatatattttgaaaacaattgtcaaagcatcttttacacaaagatcatccatttcaatttgataggcaggtagtttctaagaagaagcctctgcaaatcctatttttaaatagttaagaaaatgccaaacatttaattcagccttgcctgtcgatagtctctgaactttttatgcagtcagcaaatggctggacattccaccatttccagcacgactgattacatgtgcatttaagaaagcttcagaaggcagaatgagctagtgctttccaatgttttgtattcgtttaagtaccaaaagtctttcttcaaataaaattttttcgaagcctaatatttgaatagaataaagaagctgggtttccctggtttctaactggggaagagtccttaagatccttaacctcttctacctctctgcacctcccctcgcccctcgtcaccaccttaacagtgatcttgagggccctctacgttgtggaaattcagatagggcatgctgttctcacactaatgctctgttgcttgtgatctttggcaagttgttactcaacatctatcaagaggttggtggagatatgttctgatttcctttaatcccatgagccctaattaagaatattattaaaacattcttcaatttcttttctgaagataacctaaggcattatgatgtaaactaaaaattaacatgaattttaattaaataagatgatgtaatgaagaactgtcaaatacatgactaagcatttctttctattcatgtttccaactacaactgcatatgaggtcatatcaaatatctcctgcacaaactatgtctatacctaggaacaagggttcatccttccagtgaattcagggaggggctttcattcaagatatatactgtacttaaaccaaattgttattattgagatagtcctggttgcactttaacatttatgtttatgtttcatgcagggctaatttcaggcctggttcctatgtatatcggtgaaattgctccaaccgctctcaggggagcacttggcacttttcatcagctggccatcgtcacgggcattcttattagtcaggtaaaaactccccatccttatcccctactgcacccatctacttcatcctctacagtaccactactactattgcatcccctactgtacttcctccacttcatccatctcgtccctccctgactgtccattctcactgtagaccagcacagagagaaaagccaattctaccagtggtagtggaggtggtgtagagacatagagtttttcgttcaaaggtaaattattatcactcctcacttttccccttggaattgttggtgggatagcactggaggtgacctggcaagccaggtcttaactttagagctattctagagttaaattattccatttagatgtcaagaaatagaaaacttcgtgtttgactgcctgggtttcctttgttttaaacatcttacttgggaatctaatatgtaagtgattgccacaggaactcctgttcagctgagtctatccttcccttctaccctatggtgtcaaagggagtctgggaccccacacctacgacaatccagagggtagtctataaactgttgccataggaatcgccaagacagttctcatcacagtaattgttctatctataaaacccctttctataagttctgggtaatataagaaggaaatatcaagcaaaggtccaaagtcatggatgattttaacacagtattattctatctggttgcctggagaatacagctatgtgttgctttagatatcaagtacgtatttttgcctaagcttggttgattctcatcctgactgtccaattggagttaatgaaacctagggtaattccttatataacaaatagttcctaatttagttaaagtgagataaaaaaacctaggttaattccttatataacaaatagttcctaatttagttaaagtgagatacaatagtaacagtttccgtttttacttgaaccaaagttgtcagagactactattaaatagccaaagtactttttcaacaaactagtgtaaaaggtagatccaaagtattatgtagttgatatacttcctccttgcattttcagattattggtcttgaatttatcttgggcaattatgatctgtggcacatcctgcttggcctgtctggtgtgcgagccatccttcagtctctgctactctttttctgtccagaaagccccagatacctttacatcaagttagatgaggaagtcaaagcaaaacaaagtaagtctgtggatggtttttctttcttcctattgttttggcattatcagctaatgtaaaacagtgctttccacatgaagttggtgattaaatgtaagaagaatgtgcaaaatcgcttttatatgactggtgcatgtcatttggcacccataggcattcacttaagccgaaaccagaaatccatacacacggtattagactcaaccagaggtttctaaaagatccctccagcattatgcttctaatataatgaggatcatagttttatttgtcataagatgaagccaaatgttctatttttcttttaaatcaaagagcaggatctaatttaacaaaaaaagaatttccaacacccatgctattaagtaatacaatggggcatgcagaaatgtagctctttcattaacataaaaataaatttctttttgttttggcctgagttgtttcaacctgatcattttcttggacaggcttgaaaagactcagaggatatgatgatgtcaccaaagatattaatgaaatgagaaaagaaagagaagaagcatcgagtgagcagaaagtctctataattcagctcttcaccaattccagctaccgacagcctattctagtggcactgatgctgcatgtggctcagcaattttccggaatcaatggcgtaagtttaagaacacccactaactcttaagagcacagtgaattaaaatagggaaggcaaggggtacaagtttaaatagctaaaagatattttaaggtattggcatcatgggtcttgctataacaaacgtacattgagtaagcattaatttccattttgcttcaaaagttttctaaaattacttaacaattttttaaagtgtcaacagtcaatggtactatatatctattaaggtgaaggcaaaaagcaaaaatcttaatacatacaaggagggaaaaggagaataattatacaaccctcccccaaaaaactgcaaggagcttctacagttgagtattgaatttaggatttctgatagcccaagccaaatggagtcaagggttccctttatctatttaaatgaagtataccagatagccaggtgcaaagagcagttcctgccatctaagaaattttcactccatttgaggagatagcacacaaaataaataatagagtaaactggcatgatattgttgactaaggacggtagacaatacatgattgaaaaacatactgagcattaaactagctagcttttaggtcttacactgaaacccctgcatcatgcagaccaagatggttctactgacaattgactactagaggaaaaaattaagcatttgttaagaaactagattaaaaaaaaaaaaacaccacttctccccttttgttgctgttaaaaatgtaaactggacatttgctgtagtgagccaatgccaaatccacatgggacactttgtgggtgattgagagatgggcaaacacttgggggaggcaaaggaagtaattcccatccattgaaacaaaatgagacctgaacctcactccacaaactccactgtggtctccgtcctcctttaagaggtccttgatgtttatttttattaatactctgtataactttgaggctcagagaccaaactcatatctcccatctcagctctgtctgtatattcaatggcataaaatttaatttctctgaaccttactgtttcagcttccatcccagtgcctgacttaaagaggaatctaggaaatgttgaacctgaggctgttgggcagcctaaaaatggtgggatagtgtgaagcgtgctgtaggcctctatgcactgaacacagttggcacagtcctctacctcagtcctgtctgcaggaagaggtaccagcaataggacacgttaggtggggaaggaatgacaaaggatgatggatagcagaatgacctaaaagacataaatatataaacataactaaattttaaaaggctattagaaaggttgtgaacaaaatttctccatgtctactgagactagtgaaattttctggattaaatgcaatagcaactagacctcttatacatgctggtgagactgtaaaattgtcataacttctttcaaaaactatctggcaatatctatcaaagttgagcacatgcctacaccatggtccagcaattctattcctagttataaatgcatacatattccaccaaaaggattgtactagaatgttcctagcagcactattcataatcactattcattattactattcataatcaatagctaaaagacatttaaaaatgttgacatcatgatgtgtcttgctacaacaaatatatattgagtgagcattaactttcgttttgcttcaagttttctaaaattacaatttttaaaaacgtcaatagtcaatggtactatatgtctgtttaatattaaggtgaaggcaaaaggcaaaaatcaaaataaatacaaggagggaaaaagaataattacacccgcctcccaccctcccccccaaaaaaaactacattgcaagtggcttctagagttgagtattgaattgaggatttctgatagcctaatgaatagtaaattattcatttaggaatggcagctacctaaatactcatcaatagaatagtagtaaatcgtggtatattaatataataaaatactacatagtaatgatagtgaactgtctacaatacacaataaggatgattctcacaaaggtaatgttgactaaaagaagccaggcacaaaatgatacatattatgtggttccattcacatcaagtacaaaagtagacaaaatttatctatgatgtcaggagttgtaagagtggtttccttgggataagtgataaagggagatttaagaagtttctggaggggtggaaattatttatctcttgatctgggtgctagttacataggtgtgttcagtttgtgaaaattaattaagctgcatatttatgtgtacttttctatgtatattatactttaacaaaacgtttcaatttatttacaaaaataaagaaaatgcagtagcagagttctcaactaaatataaggaggacgtttaagcaatcagaagctttaaacactaaaggaagactgagggttctcttccttggaaggagaaaatctgtacgaagttctagggtgcatgccgctatagaaacaactaaaaataaacaatctaaaatatttcttgctttaaagatatcagtgccagacttcttaagattaaggctaacctgtttttactttgcagattttttactactcaaccagcatttttcagacggctggtatcagcaaacctgtttatgcaaccattggagttggcgctgtaaacatggttttcactgctgtctctgtaagtcaatgccctagataaatactctgcttgttccttagtccagaaattgcaggaggggtggggaacttcggctctaaaagcaatcaatgacttattgtacacatgctctaagtgtgtaaacccaagtgagtcatgagaagagtcctgtttgaataagccaaccactgcattgagattaggcataactgaggtgaatcgctgattctctgcactgctgggatgccatttagtcactcatttgtgaatttttaactcacttggggacacagagaacttcctccttgtgcagattcctaggttccttcttttctctgtacataaaccccttgggagtagctgacagcttgtcatttctattgatattggatggtctacttagattcctctttttacatagttcaaattcttttttttaccatgtgccttgggggaaacatataaaaataaataaacaaggccctctctaacagacatttaagcctttaagcaaagttaaacagactcagcaaatggtattaagccattgagcagagcttccaagtagttcacaaggttgtggcttccggtgatgcatgagagtatgtgtgagattatgagggaagtgacatagtaactagaaatgttattgttttcttccaacaaaaaaaaaagtcatatactcttcttaaaaccaaataactttatataagaagtgatggttcttatatattaaggatatataagaagtgatggttcttatatattaaggatatataagaagtgatggttcttatatattaaggatatataagaacctgacaacaagaatatctaacataataatctaagaagtaaacaaacaacaataaagacaaaaactccccaactaatgtaattcactgtagaatgagagtcattgagcttatttttatctttgttcaacaagataaaaacagcaaaaagtttattcttttcaattttagtcacaatactatactcaatataatttagtcacttgttttttattctctgcacatgaactcttaactattaccttagggtgatcaataaattacagcctggctacccagatcaaaaggcaggtttgtccagaccacattaaacagtgctggaccttggaaagagcaggaaaaacagataataacgaaacaccaatggttctgtagacatacctttagagataaggcctgtttaaaccaaaaggccactctaaatcaatcaagacctgtttctgaagtgcaatccaagggactattcacccttttgtctcctggaatattttttacaaattcttcaacatattttttatgatagattattattaaaacattttgtgtataataggattttctatgtaaagcatcaaattgtcaagattgggtagcctaaattctgaaaaaatctaaagaggaaacttctgtaaagtttcatttttgcaccctgctcccaaccccactgatgtgggaggagttgtttaagacagtgtcctaattattttgaatgtacctttttagagtccatcctttgattctgtttaagtttttgaacagggaagtgacataatcttttaaaaccagtccaaatcattaattaagcctccaggactacagatcacatttaaaatttttaattatattaatttttgaaacattgttttaaagttcaaaaagtataaaaaggatagtccctccgtcacccagtttctctccccaaaattaaccaatgttaccaaattgtgtgtgtactttcaaataaaaatatgcaaatagaaatatgcactgaatatattaatgtttcaccaaattggaagaacatcagtttgtttttgggaagagagactttcccaactccacactaattgtgttccacatcctatattttcttccacactaatgggctggtagaagagggcctgtaatcttgagagaaaaaaagcagaaagaaaatggagggatctaggaagcaggatgacactgagaaagaagcggtgactaccaaattggaactaagagcccaggatttgcgtgaggccctggggcaaagatgagcgttctaattgggaagacatctccagccactgaccatgtctcactccttgtcacactcatcctgagtgtacaccaggcctcagggacagaggccaactcaattttcaagatgttcagttttagagtttatagtaagggagcttattcacaaagaaatgcttctattttcttggtagcttgacgtggtggcaccaagccagttttgaacatcataataaaagagttaaaatatagagagaaatttaatgaacttgagaaaagtctgttttttccaacttccttctcaataattaaatatgtgctcttagcttatcatcttatctgaagtgatttaaaactctgatatgagtgtgcctctgagaaacaggctttcactgtaggtgaaatgtttctaagatgtcttcagagccagagctcactatactaaagacattggattgctattgatttactgataggctgatgagccagccaacttgctcaccaggtgccaaagtgagaaattatgacaggaagttttgtggggggtgagggggagagtgactcaccagccttggtaatattccaaggatcaggcaagagtataacaaactctggtcttggctaattgtaaaacttaaccattaatgcaaaggtccacaaaactaaaggaatcaatgacgtatctcctcagttaagataagaaagcattttaaccctttgctttaaagtgctaacttttaaaacgaatagttcactcccagcacaagatacaattaagcataccagaaaaatgcaggcctattttggttcaattatcaaattccacatgttgctaggtgagtggtcataataggactttattaagcagtgagaaaattggatgagaatagttgacacctgaacagttgtactgtttccggtgtcaatagtgcacagacccttgtaattataacttaggataactattagaaaataagttaatgtcatgtttaaatgtggaaccttcaaattttaaatgtacaggacatctattggaagagaccccagctgtacagtctgtgaatattgtacccaaagtgataatcctggagtagtggtaacattatggttctatctctataatggtctattcaaaccaatgtgactaaattaagcagatatttgatcattacccgctgtccactgaaactagctctgccacctggggctagagtcactccccaccttgatctcactcctgtaaaatggaaggatggaattgcctcttatctgttatataaattaaaatgacctctttggcagtaaaaatgatttaagtaaacagtcaatattttgtgactcacaaaactgagataatttctttaaaattgtcctaggtattccttgtggagaaggcagggcgacgttctctctttctaattggaatgagtgggatgtttgtttgtgccatcttcatgtcagtgggacttgtgctgctggtaagtttggtgcctgcactgaggtttttcattaacatatgatggtacctggcacctctgtggtccaggttaaagtgctttgtattcaaaaatatttgagactgacttacgaaataaagccagagcaacagcataaaatcaaaggagatatataaagaaaagatgaactagtttcttgggtttaagactgaatatcagcatgtaaattctggttgtcatccagggaggccatgtacccatggttagagcataggctctggattcaccgccaactgggttttaatgctgactctgccacatggcttcctgtgtgaccttgggcatgtacctgaacctctgccctcctggcattgtcatccactacttcacagggagctaaacatcttgtctggaaaccttagtatgagcagaagcaaaggtcactggatccttgccctgcctcttttacaggaaaatcctaatccagaggatttccttataagaaatctaaagagttatgcatgattcagactagaataatttctctcagaatagaataacttatacttgcttgaacaaaatacattagaaaaagttgtatgccgcctgtgaactcagaggctacttagctaaaggaaaaagcagccaaatgatctcagtcccactattgtttttgtttttttcctcagaataagttctcttggatgagttatgtgagcatgatagccatcttcctctttgtcagcttctttgaaattgggccaggcccgatcccctggttcatggtggctgagtttttcagtcaaggaccacgtcctgctgctttagcaatagctgcattcagcaattggacctgcaatttcattgtagctctgtgtttccagtacattgcggtaagcagcctaatattccacagatttactgaacagaagagagggtcaaaaaactgctaactcaaagtctgtgtttgctttctatccaggacttctgtggaccttatgtgtttttcctctttgctggagtgctcctggcctttaccctgttcacattttttaaagttccagaaaccaaaggaaagtcttttgaggaaattgctgcagaattccaaaagaagagtggctcagcccacaggccaaaagctgctgtagaaatgaaattcctaggagctacagagactgtgtaaaaaaaaaaccctgctttttgacatgaacagaaacaataagggaaccgtctgtttttaaatgatgattccttgagcattttatatccacatctttaagtattgttttatttttatgtgctctcatcagaaatgtcatcaaatattaccaaaaaagtatttttttaagttagagaatatatttttgatggtaagactgtaattaagtaaaccaaaaaggctagtttattttgttacactaaagggcaggtggttctaatatttttagctctgttctttataacaaggttcttctaaaattgaagagatttcaacatatcatttttttaacacataactagaaacctgaggatgcaacaaatatttatatatttgaatatcattaaattggaattttcttacccatatatcttatgttaaaggagatatggctagtggcaataagttccatgttaaaatagacaactcttccatttattgcactcagcttttttcttgagtactagaatttgtattttgcttaaaattttacttttgttctgtattttcatgtggaatggattatagagtatactaaaaaatgtctatagagaaaaactttcatttttggtaggcttatcaaaatctttcagcactcagaaaagaaaaccattttagttcctttatttaatggccaaatggtttttgcaagatttaacactaaaaaggtttcacctgatcatatagcgtgggttatcagttaacattaacatctattataaaaccatgttgattcccttctggtacaatcctttgagttatagtttgctttgctttttaattgaggacagcctggttttcacatacactcaaacaatcatgagtcagacatttggtatattacctcaaattcctaataagtttgatcaaatctaatgtaagaaaatttgaagtaaaggattgatcactttgttaaaaatattttctgaattattatgtctcaaaataagttgaaaaggtagggtttgaggattcctgagtgtgggcttctgaaacttcataaatgttcagcttcagacttttatcaaaatccctatttaattttcctggaaagactgattgttttatggtgtgttcctaacataaaataatcgtctcctttgacatttccttctttgtcttagctgtatacagattctagccaaactattctatggccattactaacacgcattgtacactatctatctgcctttacctacataggcaaattggaaatacacagatgattaaacagactttagcttacagtcaattttacaattatggaaatatagttctgatgggtcccaaaagcttagcagggtgctaacgtatctctaggctgttttctccaccaactggagcactgatcaatccttcttatgtttgctttaatgtgtattgaagaaaagcactttttaaaaagtactctttaagagtgaaataattaaaaaccactgaacatttgctttgttttctaaagttgttcacatatatgtaatttagcagtccaaagaacaagaaattgtttcttttcagtgtgatttgtttttcatttgggccaatttgggataaactattttcacttgggatttcaggatacagtcaaaataagcttaaataactcaggacatctttgtgctaaactgtgaactctggacaaaaatagagagtctctgaatagggcaggagcaggaaaatggctcctgggtggctcttgtatgcttcttcaggatgctgatggcctttgggaagcccagtgtaaacaatgataaaggagcttaacacttttataggtgatacatgtgatttaatcaaatcactattcctgatctcatttactaacagaataaagtggtaaatatttaaattaaaaattccaaagaccacttttaagtgcttcttcactattttgactggcccacaaacaccagaaattcagaccctgaagttttctgcctcagagaaatttaagtaccttatattgttccccttctacaactttttccttgcagagatacatgtgagttgacaagaaacattaaagggaaataagaagaagctgataaagctttataggaggaccaaagaactagcttactataataaaaaaattttaagtcttcaagggtatacatcataataaaaaatcaaattgacagtaattaattaaatttaatcccagggaaattagatgtgaatttgaacacctaactttccatgtactctctcatttttgtggaagtgtttctatactctaatgcctttacaaatgtgatttttctcttagctcatttgaagtatgagaattagagtttttggtctcgcattcacctgctacatctaggattgcccactgtcatgactcccaggaaaaggtcctatcttagcttcctcctccctactttcctctacatggtcagcactgtaatgtagctaagatatagtaaggcattgctccctccccctacacttcaaggagttcacagtctaatggggagttcaggaaggccagagtattaatatccccatctgtgtcttttgccttccatgaacctgggttttgagccctctcttgtaaaatgggcacagtaatattacctacctcagggagttgtgaggattaaacatgaagtgctaagcatagtgcctggtacaaagacagtactcaataagtgctacctaaaactagtattcatagcaatactgttaggataaagaattatcatatatgagatagttccaaatttttgtttttttaaaaaaaaaagagttttataagttcaagataatattttcttacttcaaagaaacaatctcacaacgagggaatggtaagaatcaggagagattactaacctggcagaggagctatcacaatcacaaaggtggtttttccagggcacggctcatccattacactccagatgtgctgacccctgccatttccccaaatgtgggaaacccaactgcacagtttgtagtagtgggtgactgtgttcatgcgctcccctgaaaacaacaacaacaacaaagaatcagaagagatactaggctatctaattcctaaatccaaacctgatatttctaagtaagattataagaatttttattgcattttctgaatttgcttttgcataagttatgttatttttacagggtctatattactattatttcttagaataatactaattataaaacaaaattctgtatatcacatttaaatgtaatttaatagaattataatcacaagacaagaccaaactttgttgataatcctcagtaattgcgaaaggggtatatacatgtaggccagcatacatgcataaactacttcttattgctagtctaattgttccatatgtagcaaatacagcagttcagcaatatcttgtgcttacagggtcctaagcagaggtgatgagtcaagtgtaaatatatatatatattttttttatttttcatggcaattgtatattagtaacctggggagaaaaggtttattgacaaccactctgatccatctgctgctat

SEQ ID NO: 177 - DNA, 99656 bp, Human; identical to SEQ ID NO: 127
  misc_feature (1)...(99656): n = A,T,C or G

SEQ ID NO: 178 - DNA, 5417 bp, Human
ccggccgacaacactggcaaactcctactcatccacgaaggccctcctgggcatggtggtccttcccagcctggcagtctgttcctcacacaccttgttagtgcccagcccctgaggttgcagctgggggtgtctctgaagggctgtgagcccccaggaagccctggggaagtgcctgccttgcctccccccggccctgccagcgcctggctctgccctcctacctgggctccccccatccagcctccctccctacacactcctctcaaggaggcacccatgtcctctccagctgccgggcctcagagcactgtggcgtcctggggcagccaccgcatgtcctgctgtggcatggctcagggtggaaagggcggaagggaggggtcctgcagatagctggtgcccactaccaaacccgctcggggcaggagagccaaaggctgggtgtgtgcagagcggccccgagaggttccgaggctgaggccagggtgggacatagggatgcgaggggccggggcacaggatactccaacctgcctgcccccatggtctcatcctcctgcttctgggacctcctgatcctgcccctggtgctaagaggcaggtaggggctgcaggcagcagggctcggagcccatgccccctcaccatgggtcaggctggacctccaggtgcctgttctggggagctgggagggccggaggggtgtaccccaggggctcagcccagatgacactatgggggtgatggtgtcatgggacctggccaggagaggggagatgggctcccagaagaggagtgggggctgagagggtgcctggggggccaggacggagctgggccagtgcacagcttcccacacctgcccacccccagagtcctgccgccacccccagatcacacggaagatgaggtccgagtggcctgctgaggacttgctgcttgtccccaggtccccaggtcatgccctccttctgccaccctggggagctgagggcctcagctggggctgctgtcctaaggcagggtgggaactaggcagccagcagggaggggacccctccctcactcccactctcccacccccaccaccttggcccatccatggcggcatcttgggccatccgggactggggacaggggtcctggggacaggggtccggggacagggtcctggggacaggggtgtgaggacaggggtcccggggacaggggtgtggggacaggggtcccggggacaggggtgtggggacaggggtgtggggacaggggtccggggacaggggtgtggggacaggggtgtggggacaggggtgtggggacaggggtgtggggacaggggtgtggggacaggggtgtggggacaggggtcctggggacaggggtgtggggacaggggtgtggggacaggggtgtggggacaggggtgtggggacaggggtcctggggataggggtgtggggacaggggtgtggggacaggggtcccggggacaggggtgtggggacaggggtgtggggacaggggtcctggggacaggggtctgaggacaggggtgtgggcacaggggtcctggggacaggggtcctggggacaggggtcctggggacaggggtctggggacagcagcgcaaagagccccgccctgcagcctccagctctcctggtctaatgtggaaagtggcccaggtgagggctttgctctcctggagacatttgcccccagctgtgagcagggacaggtctggccaccgggcccctggttaagactctaatgacccgctggtcctgaggaagaggtgctgacgaccaaggagatcttcccacagacccagcaccagggaaatggtccggaaattgcagcctcagcccccagccatctgccgacccccccaccccaggccctaatgggccaggcggcaggggttgacaggtaggggagatgggctctgagactataaagccagcgggggcccagcagccctcagccctccaggacaggctgcatcagaagaggccatcaagcaggtctgttccaagggcctttgcgtcaggtgggctcagggttccagggtggctggaccccaggccccagctctgcagcagggaggacgtggctgggctcgtgaagcatgtgggggtgagcccaggggccccaaggcagggcacctggccttcagcctgcctcagccctgcctgtcacccagatcactgtccttctgccatggccctgtggatgcgcctcctgcccctgctggcgctgctggccctctggggacctgacccagccgcagcctttgtgaaccaacacctgtgcggctcacacctggtggaagctctctacctagtgtgcggggaacgaggcttcttctacacacccaagacccgccgggaggcagaggacctgcagggtgagccaaccgcccattgctgcccctggccgcccccagccaccccctgctcctggcgctcccacccagcatgggcagaagggggcaggaggctgccacccagcagggggtcaggtgcacttttttaaaaagaagttctcttggtcacgtcctaaaagtgaccagctccctgtggcccagtcagaatctcagcctgaggacggtgttggcttcggcagccccgagatacatcagagggtgggcacgctcctccctccactcgcccctcaaacaaatgccccgcagcccatttctccaccctcatttgatgaccgcagattcaagtgttttgttaagtaaagtcctgggtgacctggggtcacagggtgccccacgctgcctgcctctgggcgaacaccccatcacgcccggaggagggcgtggctgcctgcctgagtgggccagacccctgtcgccaggcctcacggcagctccatagtcaggagatggggaagatgctggggacaggccctggggagaagtactgggatcacctgttcaggctcccactgtgacgctgccccggggcgggggaaggaggtgggacatgtgggcgttggggcctgtaggtccacacccactgtgggtgaccctccctctaacctgggtccagcccggctggagatgggtgggagtgcgacctagggctggcgggcaggcgggcactgtgtctccctgactgtgtcctcctgtgtccctctgcctcgccgctgttccggaacctgctctgcgcggcacgtcctggcagtggggcaggtggagctgggcgggggccctggtgcaggcagcctgcagcccttggccctggaggggtccctgcagaagcgtggcattgtggaacaatgctgtaccagcatctgctccctctaccagctggagaactactgcaactagacgcagcccgcaggcagccccccacccgccgcctcctgcaccgagagagatggaataaagcccttgaaccagccctgctgtgccgtctgtgtgtcttgggggccctgggccaagccccacttcccggcactgttgtgagcccctcccagctctctccacgctctctgggtgcccacaggtgccaacgccggccaggcccagcatgcagtggctctccccaaagcggccatgcctgtcggctgcctgctgcccccaccctgtggctcagggtccagtatgggagctgcgggggtctctgaggggccaggggtggtggggccactgagaagtgacttcttgttcagtagctctggactcttggagtccccagagaccttgttcaggaaagggaatgagaacattccagcaattttccccccacctagccctcccaggttctatttttagagttatttctgatggagtccctgtggagggaggaggctgggctgagggagggggtcctgcagggcggggggctgggaaggtggggagaggctgccgagagccacccgctatccccagctctgggcagccccgggacagtcacacaccctggcctcgcggcccaagctggcagccgtctgcagccacagcttatgccagcccaggtccagccagacacctgagggacccactggtgccttggaggaagcaggagaggtcagatggcaccatgagctggggcaggtgcagggaccgtggcagcacctggcagggcctcagaacccatgccttgggcaccccggccatgaggccctgaggattgcagcccaggagaagcagggaaccgccagggccacaggggcagagaccagggccagggtccccctgcagccccttagcccaccccctcccagtaagcagggctgcttggctggcttcctttgctacagacctgctgctcacccagaagggcccacgggccctggtgacaaggtcgttgtggctccaggtccttgggggtcctgacacagagcctcttctgcagcacccctgaggacagggtggctccgctgggcacccagcctagtgggcagacgagaacctaggggctgcctgggcctactgtggcctgggaggtcagcgggtgaccctagctaccctgtggctgggccagtctgcctgccacccaggccaaaccaatctgcacctttcctgagagctccacccagggctgggctggggatggctgggcctggggctggcatgggctgtggctgcagaccactgccagcttgggcctcgaggccaggagctcaccctccagctggggacctggccactggggcagccctgttcctgaagctctgagctcaccccttccccatgaccacatcagcccccctccacccagagatgtcacagcccccagctagccccgcctccagagtgggggccaaggctgggcaggcgggtggacggccggacactggccccggaagaggagggaggcggtggctgggatcggcagcagccgtccatgggaacacccagccggccccactcgcacgggtagagacaggggcgccctgctggagctgaggtatgtgagctcgcgcggggctgggccaaagcggggcccggtgggccggctgggaggctgcccaccagtcagccatcggccaagctgttgccctggctgaccctgatggccaacaaggccgtagggagtgatgggcagaggccccttctgggaggggagggtcagtgctctgtgggggaccgtgtgttggagtggagggcagcaggaggagccctttggtgtccagggactcctggagctgccccagccttccaggacttgcagggcagctggcactggctggtgctgggggctgaggagtgtcttttgaggggccaaattttctgtgacttctgtcctgggggacctctgacctgaggcctcaggagagggcaaggccgcccacccaaaagagatgcagccatggttcgcggtgccctcggctgccctgggccagagctggggctagctttcaccttgttgagacccaggactctgtcccccaagcc

SEQ ID NO: 179 - DNA, 12220 bp, Human
tgttggctgggctggagtgcagtggcactatcatagctcactgcaaccatagcctactccaggtcttatgctatcatcctgccttcatagttgggattacaggtgtgtgccaccttaccacactttattcaatttttcttttttttgagtcggagtcccactccgttgccaggctggagtgcagtggcgcaatcttggctcactgcaacctccacctcctgggttcaagtgattctcctgtctcggcctcccgagtaggtgggactacaggcgcgcgccaccacgcccagctaatttttgtatttttagaagagacagggtttcactgtgttggtcaggttgggctcaatctctcggcctcgtgatctgcccacctcagcctcccaaagtgctggaattacaggtgtgaaccaccgtgcccagcccttcaatatttttaaagattatataaagaaaagcatagcttccacacacagttcaggagtcagggccctgagtgaaatggagtataaggtgatggaagattgcccctggctttgaggatcatcttgctggatgaccagagtttgtttttcatctggaagaatcatggtccccctcttggagagaacctggagtcctggccacaccttctgagcttctgacattaagattcggtgtggtgtgtgagcagctgggagtaaatgtgagaacagtcctgccaactaccttctctgccccatcaccactcacttcacctccctcaccccgattctcaccccagaaaatcaatattaagcttccctttggaggggcccctcttctttcttttttttttaaccagttttttttttctctgaagcaatatcaaacattagaacaaattcacccacacacaatgatggcctctaaatatttgaagaccatgttggtctccatgagagggcttctttgcttcagactaaaccaaaccaggtccttgtgtgatatttcccaagcctctctttatcctgccaaccctccttggatgtcacacttggaattgtcaagggtcacttaataggcagtgcctggagtcaacactggccctctgttctggccagaaagacacactgtaattctgctgagtctgcaaagaatgttcaaggggtatttgtgtccgtagctgctcgtgcagcatctcagcctgcggtgtcagactcgaacccagagctgtgtcaaaagagtcaggactcccctctgctgcccttgtgcactggcaggggcactaggttactagtgctaggagactctggtcagtgcccatctgtgctgtcacatgcagggccctggcagtgaggtctggagaaggaagagaaggggcagggaaccccacacgttttgctggtcatttcccaccgtggtcctgccacgggaacccccttcttccacctccattccccactttaggcagaaacatctctcatcctttttcttttctccaagaatcttcccccaaaatcttggcatctcctatacacatctgtacctttgctatatctgtgggccttgttctccctgtaggactcctcttggaaagctaactccccctgacattggagaattttatcaaattgctgagtatcctcccttccctctcacagaccccatggcatgctcagatcacagtagaagacatttcctctgctgccaaacccatggcactctgaggctgactgtgtccacctcattccctcagctgtcttctctttgctgctattaccatgttccaagcagactttggagcatctcccccacagcagcatggactttggcagatttcttggggaccagcgatgtcctaacctgtttgcttttccagggctgatgtttgcagggtgtttttttttttcttttgaaccaaagcagaaatcatcctgtatccttatgcaattcttccggcaggctccaacagataaataaagcccaccaccctccatgggtctacctttcccagcagagcacctgggttggtcccgaagcctccaaccacctgcacgcctgccagggcctctctggggcagccatgaagtccctcgtcctgctcctttgtcttgctcagctctggggctgccactcagccccacatggcccagggctgatttatagacaaccgaactgcgatgatccagaaactgaggaagcagctctggtggctatagactacatcaatcaaaaccttccttggggatacaaacacaccttgaaccagattgatgaagtaaaggtgtggcctcaggtaagtggacctgctgtctatgagctgaaataatgtgtacatggagctcaatcaggtgcctcaaaaaatcaccatcacccagtgcaaatgaaaccacagaggagtaaattctctgatttcttcccaggagtgagggaaggggcaggcagagggcaggagaggagacattctgtatggcagtcatgggtgtcaggagggagctgggtggggtgtgaggtggtgtgcaggagaaaaagtgcttcaaatggtagtgtgcagatcacagacagaaagtgtaacttgctggaaaaactaggacccaagagaccagctcctagttgccaagttaccactggctgaaaatcacgtatctgtctttggtttggtttctctctaacaaagactgagaatgaataaaactagcatctggcagatgcctactatatgccaggcccattcacatagattatctcatttactctttcccggtcctgcctcctggtgctgtgtggtacatatattgttcttgtcttacccaagaggagaccaaggctctgttgtgtgtgtgtgtgcagtttttttgttttttgtttttgtctttttttttttggtccaaaatcatataattactaagtcttcaggctgggatttgattccatatctgtgttccttcttctacacaaactgcctcccaaagagagttacccacatcccagagagaagtcttggcataaacacaattcacctcctcacacactagacaggaaaccaacgcagcttgaagccagtgacaagaaaaatcaagctggaaatatgcctcggggatcagtcaagagatttggagaggtggaaagaagctgtctgcctactgcctgttttgaaattagatttatttctgattaaggacaattctttcagcaaatatgtattacaagccttccttggacaagaaccagagatattaggttgaaccatataaaactgccatttttctatatcaaaagcaaccaaatattggccgttttaatggttcaacctaatacagtggtgaaaaaggcacaatatgtgcccacaagagcttacaatctaggttggaaaataaggtcaacaacaggaagcctggaccgactgacgactgccatccgtctcacaaagagacaaaatatttgaaatcaggattgctccggatggattttaagagtgctgcagccatattaaagcacagtggtggttaggaggaaacgctgatcaagtcaggggaaatgaacacgcaacacgcacatctgagggaaaaggtaatcatgaatgggcattgtgacttttactaaaggcagagcttcagagttggttcccttgagaaacccaggtgtacccggttcctgttcgccagagctgtgaacgctttcaggcagtcactctgggcacacctggacatcataaaatgcggaacttctcccaggggaggggatgctgaggcttcaggtactagtgaatcaggcagaaccaatgagaggcaaacagagctgggctgagaggagaaaaggcatacttgtaccttctggatttttcaggcttcgaagacaagatacagaaacaggtgaactcacaagaatatctccaaggattgttgcaagctccctcgtgtctacactagtgacatccagtttcctgtcagagggagacatgcccttccccattatcgccagcagggggaagtagagagcagcatcgttgcatgccggcacctgctgcacaagccaagacaaaggaaaaaccaaggacaacagcagcaaaaacctctaggagggaaaagaaaacggaggaaggaaggaaagcaaataatgaaaaggaagaaagaaagaaggagagggagggatagaggagattaaaaaaagacagtaagatattaccctacaccaccttattttgcagcttgtctgagaaaaatccaaacttgcattttccaaagcactgcttgaagagtgaaatcttaaaaaattaaataaataataaatacaaataagtgttaacacccatttgtagttttcaaatagagctcagagtgagggctgtggctccatcgacttgttcaagcccaggaccccgtctgctttgcgagcatcatctggtgcttccttaatcaacagacgaagaccagacaagccctggtcattgtcctgcccacaggccagttcagagctagacggagttgcagactgacagtaagaatgacatttccctcacctctccaaaagcggggtgctctcaagcccaatgagggcgcataccgtggaccgcaccacaggatcaggggaataggttgctcacggcttcactctttgtctccacagcagccctccggagagctgtttgagattgaaatagacaccctggaaaccacctgccatgtgctggaccccacccctgtggcaagatgcagcgtgaggcagctgaaggagcatgtgagtacccttcttaggatgactgtaggtggcccttcggccagctccaccgattcacccagcgtctcagcctgccttcttggctagccagggtgcagtttctaaaattgccatttgtggccgagcgcagtggctcatgcctataatctcagcactttgggaggctgaggcaagtggatcgcctgaggtcaggagttcaagaccagcctggccagtatggtgaaaccccatctctactaaaaatacaaaaattagctggacgtggtgacgggcacctgtaaatcccagctcctcgggaggctgaggcaggagaatcgcttgaacccgggaggtggaggttgcagtgagccaagatcctgccattgcactccagcctgggcaacaacagtgaatctctatctcgaaataataataataataatcatcatcataaataaaattgccatttgatgccacttgccctggggctgatttttacaagcgtttaactatatcgttgtatccctgaaagcagagagtgccatgtttcagtattacccagcaaaggcgattttgcaagggtcacctttgacagccgtgcctggagggagcctgcccggggtgcgaaggggaagggcagccatcctcacgtgggtttctttctccaggctgtcgaaggagactgtgatttccagctgttgaaactagatggcaagttttccgtggtatacgcaaaatgtgattccagtccaggtacagatgactattcttattctcattttttccttgtagagaaagtggggaagggatctgaataattttcaacttaagtagttctagcagctttgtcggtgaggaaaaggagaagccaaatttcctgggttctgggatttttaaaattgtgttttaagaagctactcttggcctggtgcggtggctcacgcctgtaatccacccacccgaggcaggtggatcacctgaagtcagaagttcgagaccagcctggccaacatagtgaaacccccatctctactaaaaatacaaaaatgtggtggtgctcgcctgtaatcccagctactagggaggctgaggcaggagaatcgcttgaacctgggaggcagaggtggcagtgggccgagatcgcaccactgcactccagcctgagtgacacagagtgagaccctgtctcaaaaaaataagaagttattcttactggaagtgaaaattgcctcgtgatgataagagctcctgcagaaatgtcagcatagcaaaagccttttgaaggtttagtaagaagcagagaaagtgcctgaagctatctggggaatgccttagcccttgctaacgcagcagagctggggccatgccagggagaatggctgcccacatcctggtttcctctctccgagcagactcagccgaggacgtgcgcaaggtgtgccaagactgccccctgctggccccgctgaacgacaccagggtggtgcacgccgcgaaagctgccctggccgccttcaacgctcagaacaacggctccaattttcagctggaggaaatttcccgggctcagcttgtggtaaagactgagattcttttgacaggttgggcagttcggtggcacttcgggaatgtactgtacgtggtggagcgggaggcagggaagaacaggcgcaggggcagcgatgagaaagcaaggagagggttgtttggaaagggaagaaagcatcctaagggggtatgaggctcctgagtgtcatgaggaccccaacaccctcagcgcctcccccatgctgagccactgtaacgtccagcagccacagctgccggcaggtacatccccactccctccgttccagctaaaaccaaagctcagtgtcagctggtagagttgcccacgtcggccagaagcactcactgtaaatttgctgggctccagtaccacccatctccgctgaacatctgccacagactcgtaattaatactcacttgtgctgacaagcttataatggcaagatcttaaaatgcctttcgagtcactggagaaaacatctcattgtactgtgggtggtttagcacattggaattcaacagaattcaaatgtttaagaaaatgtattctggatatcagccatggccatacttggaaatacgctagtatagacggcaattctattaatcagaatatgtgattctcagaacatccccaccccagactacaccaaataacagatattttattgtgtccatatgctccaactactttaaaaaagaaaagctcaagtgatatcttccatactttcatctaaatcttttcatttgagcctgctctatgaaacaggtggaagaggtattaatctcttcactttcccaccctattttggaataacctgaaccttgggtatcaagtgcagcccaagagtgagggctggggggaggcagggttcccactcctatcagtctaaggctggccttctgattccggtttcctatctgcaaactcacctccaccctgaaggaccggtgatggatacttgcccctcctacaaggaagacacaacccctacctctaaagcacaagcacttgagaacacaaccccatagcaactgccctatgtaagccattgagggacatgtcttctgggccgacgcatggtctgcatgaatggtgctccccgaaggaggctacttcccgctctccttctctgcccttttcattgtaagtcatctttcctcaagagcattttcatgtactcttctcagcccctcccaccttctacctatgtggagtttacagtgtctggcactgactgtgttgctaaagaggccacagaggcagccaagtgtaacctgctggcagaaaaggtgagtgggccgggaccttggggtgttaccactcggacagagctgtttgtggaacagaacatccttggatagtttgtatcttggggctgcagacagagaataacagtgcaaatcccctctccctgtggatcacggcaagccttcttttagggtgtcacctcatccctttaagagctgtcatcaaatcatctcacccactggaagcacatgaagttaggagaaagagagaggctatttgctaatgaagccaagtcacgcccacccactgggaatgtgaagtgcacattttctagacatataactctgatacaaaagctttcaagtccttgagccaataatgtacacttctaggattttagtctaaagaagtcatcagtggccaggcatgatggctcatgcctgtaattccagcactttgggaggccaagacgggtggatcgggaggtcaggagatcgagaccatcctggctaacatggtgaaaccccgtctctactaaaaatacaaaaaaattagccaggcttggtggtgagcgcctgtagtcccagctactcgggaggctgaggcaggagaatggtgtgaacccaggaggcagatgttgcagtaaactaagatcgtgccactgcactccagcctgggcaacagaacgagactctgtctcaagaaaaaaagaaaaagaaaaagaattcatcagtgacatttgacagaatatatctataaaaatgatttattatggatataaagagaccaaaaaagagagatctgtatgtccaacaggaaggtgtcattgaataatccatgcacatcagtaaatagaaaattgtgcagacactaaaaattgtgttttcaaggaataatgaatgatatgagaaaatgctattatggcaagtgaaaacacacaggatacaacatcgtatagtcacaatgatctcaatttttaaatcatatttaatagtattttaaaataagaaagaaatgcatcaatgttaacagtccttctttctaggccaccaccagaaagggattatgggtaatctctctcactctcaaagtatttctgtatttccatgttatatatagaatcatatacctcccacaagcagaaactataactttaagaaaaatggtttttcaaactaatttaaggttggcgcgtcaatgaaattgggggggatccatttttgaaattagttaaaataaatcctctttctctgtgggcagcaatatggcttttgtaaggcaacactcagtgagaagcttggtggggcagaggttgcagtgacctgcacggtgttccaaacacaggtaacagctccgtgaatattcttgcctacaccttcagaatacaatgaccccttcacatttatgcagtgcagtagtgatgacaggacatttgctctcccgtgcttctgaatctcacagtatgaaataacactggggtatgcggaatcatcaacaaatggaaggatattttagctatgcctttccctcccacgaactagtgactacagggaagaaccatcttactgtgtagttgacaaagccacctttttatttgtgggaggtgggagtggttttctgagttgcagagaccaggtggccagatctacctgttagctcccagtggctgcagcttcagatgacaaagagggtggcactgctgggcaagggtgagccataggtggggtgcttttactcattggacatatgtgtgtaagtccaccatcacaaagacaatcctagtgaggccggggccaacataggccagtcacccctccttgtaaccttgatgacaatcccttgtacttaggtaggtcctttcttgctagactctttgcaaataaaaatgtataatgtgaggaaattgggtgccagtgccacctgggcctgtgggttgtcttgcctgggaggaggaagcaaactaactgaaggaaatggtcctttttccagcccgtgacctcacagccccaaccagaaggtgccaatgaagcagtccccacccccgtggtggacccagatgcacctccgtcccctccacttggcgcacctggactccctccagctggctcacccccagactcccatgtgttactggcagctcctccaggacaccagttgcaccgggcgcactacgacctgcgccacaccttcatgggtgtggtctcattggggtcaccctcaggagaagtgtcgcacccccggaaaacacgcacagtggtgcagcctagtgttggtgctgctgctgggccagtggttcctccatgtccggggaggatcagacacttcaaggtctaggctagacatggcagagatgaggaggtttggcacagaaaacatagccaccattttgtccaagcctgggcatgggtggggggccttgtctgctggccacgcaagtgtcacatgcgatctacattaatatcaagtcttgactccctacttcccgtcattcctcacaggacagaagcagagtgggtggtggttatgtttgacagaaggcattaggttgacaacttgtcatgattttgacggtaagccaccatgattgtgttctctgcctctggttgaccttacaaaaaccattggaactgtgactttgaaaggtgctcttgctaagcttatatgtgcctgttaatgaaagtgcctgaaagaccttccttaataaagaaggttctaagctgaatgtggtcatgcttattgcgacttcatcccagctcccctcacatgcatagccttttaccccaacaaacacagtgtccctaatcaaaaccaaagtgaaaagagaaccaaaagagaacaaaaacctgctgtattgccagatacaggaaaaagtgagactaggatctttccacaacccataagatgtgaccatttctttttttttttttttctgagacggagtcttactctgtcacccaggctggagcgcagtggcatgatcttggctcactgcaagctccacctcccaaattcaaatgattcccctgcctcagccccctgagtagctgggactacaggtgcgtgccaccacacccagctaattttttttattttagtggagacagggtttcaccatgttggccaggatggtcttgatctcctcaactcatgatccacccacctcggcctcccaaagtgctgggattacaggcgtgagccactgcacctggccaagatatgaccatttctttatgagaaaataattcttctcattttataagagagagaaaatattgctaaaggtgggccaagctcctgaactttgtacagaataaactatccgttgattttctccagtaccgaggtaaggagggattggtaattaaaacaagatcctcactttatatctgttgttaattatgtttaagatatacgttgagtgtactgtatacacttcattttataacacaagattggtcttcctagccaatctattttaaggacccaagttaaagctgtgacttgtagtatcattagataaaggatgcctggacaggtgaatcccgtggacatttgtagacaccgtccaagtgctcagatagcatatgtgaataaaccctccccattttagcatggtccctgggcaatttcaatttttgtccatcagcattaagtttttccgatctacctcagtgatgggccctttcagatggaattttagagggcaggactgacacccagttgagtgacttcactttaaaccaaggagaatgaatcaagtgttgacactcaccttatcacttgtgcctagaggttttgccaatattccagtaaccaaaaggaaaggccagaaaggtaagaaaaccactaggtgtcacggaagccagagaagaagctatgggcagctgtgctaaatgctgtagaaagagcagtaaggacgactgactctgaggtcatggtgaccactggcagatgcagttgctctaggggcatcctggttgtcaagagtttactggtgttgttgctgtagggagactggagagtgggctgtagctgggcaagagtagccacaggatagaaagtcactagagctttctagagaaaagattaacatgagttggtctaaggtggtgggcagtggacatgataaaaagaggttataatttggaggtagaactcccaagacctgctgatgaatttgatatgggagtgagaaagacgtgaaggatgatgattcctggatttgtggctttgtgaactggatagatgtgtgtgtgtgtgtggggggggggcatttactgaggcagtgaattctagtttgtttcatttgcattacctcagtttccctcctctccaacttaaaattcgtgcagatgatttttctatgtctatttttctgtgtctggctaatgcatgccttgatctcatgtctctcaaagaagcagtgaagtcacatagacctgcaaaacctgagccaagctgcttcacctttcacttctttctgcccacattatacaaccagacatagataacagctgatgtactggtgttgggaggattaaatgagatgctacaaatttatgtatgacaccttcttgacacattctaggttctcagtaagtgccctccctttctgctgctgctcctcatcctctgaatttggtggcctcagaagattatgttgttgaccttctcttaaatatgtactctgcttggcaagtttatcctctctcatgatttaa

SEQ ID NO: 180 - DNA, 45588 bp, Human
atctcaagccaccaataaacctgacatatttgccagtttagtcataaaacagaaaatcctttgcctaatcaaacttagcttaatagttccttcagaagcaggcagggccaagaggctgagtctcgtgtttctggaataatgtggcatgtgtgtgtgtatgtgcagtgccagattgggacttggccccctggaagtgactgagccaggacagggaagggatctattgaatggtctggggaacagggctggccaagctcatggtccctctgaggtcagccctcccaccctcaaacctcctcccactccacccacccccaggaaccctcccacacactctgggtaaaacacagcttggcaagctctcacatcatggcttggtggctacagtgtgttgatcttccctcaggaccaaccaagaaagctagccttggtgcttctaaagctgccagcctcctaagggagtattcctatataggaatatactttgagaagctgataagacccctctaaatatttgggaggcagcctttgaattaaattatttgcctgctgatgtcaactattagagtgctatttaaaagttaaaacccaagaggcatatgtaaaaggaaataagtcaaatcaatcatttatctcaatatcagagtaattcagaggaactcttaattacatacctccaagagacttgtgaggtcaactccattctatctgctgcccttgaagctcagctggagtccctcaacaccccgattggaggatgaactctagcatagggaattctgagatggagggagggggcgctggttcaggatgcttggaggttctagaaagaactgaggtcacctggaagatacaacgctactctaaaaatgattcaggatggcttttctatgcattctctactcccataggaatcaggggccacctcccaggatggaatctgcctgatgctgtaacagtgttcagctccccaatttccccatgataacaggcaacctccttctgttttgtctacagttaattaatcagtcattgctgacagtaaggctccatcctcaacacaggatattttctgaagcattaatttttgtttcaatagttgatccttgtttggaatataatgtgttacaatgtagtggtacttagtattaaaatcaaaatacctttttattcatctttcaattttaatacttttagcatttcaaccattatttgaagggttacttactgcagtatgtcacatttatatacacacatgcacatgctgcagtgctttcagtttgagccagtgatattttaggccccaaatgctctgaaaaaatagagaaagctctcaccaagctaaggaagtgagcttgcagaccatgcctttaaaaattttcagcttgataacttagtcctcaagatgactaggtttctcttcccccacccctcagttagcatgtgcgaacaaggattcttttgaattcccaggaggggaatgagtttaatttgactggtaaaagtcttcctaataggatacctaatactgtggctcttagaactagctacaaaaatatttcatatgtttatgtctcataatgggtaattttggtttggatttatgtcattttgtctcagtatcacaatttttgaaaaattagttcaaagagaaaaaaaaaagaaaagaaaaaccatggtaaacattgctcagtctcatactcctaccctctctatgctaaaacaggaaatgcatttctgacacttttaaaatgagcaatcacacgtataatcaacttggttaaaacttccttcctggtaactgcaacacttcctctgcatctggatatgaagggagccccagaaaagcggaagaatttagacgcacactgggtaggtttgaatttgttttgttttcaaaaattaaacaaatgatccttcagcatcatcgcctccgctgctttatcaggtattgcttccttctattttttgctctttgtggggtctgactcggaatagtggcacttccttctcggctagattatctgaaactgttgtcggttcttgagatgatactaccaccgaatgtctgtgtttcattgtctagtccaacctgtattgtggatatctacaacgttccggcaatagttttgcaggtgcatcacatttttgtttttgttttgggaggaaaagggagggcacggcagccaggcttcatattcctacaagtgcatgcttcaagattactgtacttacagtgtttccaacatcttctcataaaaggggaaagcttcatagcctcaaccatgaaggaaaccagtgagtattagtcagcctgttttcctctgcatcttataagatcgtttggtatcactgaggcagaagttattgctgtgtatttatatgctgcctaaatttggacatgttttatttcaagttagtgtcaatatcaatgtatcttacagttctcttctttgttagttattctataatgtagcaaaagaccaaaatgaatgttttaagccacaagagacagttctttgggacagttggtttcacttactaagtataacttcatattttaagagagggaatattggttttaaaagttaagccaagatttgaacataagtttggatcaaatgaaatttgtctttcttatcttcttatcaagctctcctttttggtatacatcaaatgctccactatttcttaaggaaataatgtagttttaagtctaacattagttatttaagagagtaaacgatattttctgaaacattaattttttgtttcaataattgattcgtttagaatataatgtattacaatgtagtgatactaaacattgaaagcaaaatacctaatctttcagtgttaatacctttcaaatttcaattattatttgaaggatttcctattgcagtatgtcctatttatacgtaagtgctttgtgaagggtaggtacttactgaattttgtggaaagagtgagtaggttaatgagaataaatttgtgaatttgtgttacaaaaatgaaaatattagagcaaaaaagaagttaaatgattgggggtcttaacagaaggtcactggagtccagaaatcctgccttccatcctgtagctcctccattattaagtagagacagatcaaatgaattttaattaattaattaaacaatgttaaaattacctaaatgttcctattgggagagtacagccttgggtgactcttctaagatactgccctaatatagcagtgacagccagaatgctgacaaattccatgattcaaaattttacatatctgcaaatggttttgactgtaactttactaattccgatatgttttagctttacaaatgaaatgacttgctttcctaattagaaagaaaaaatgaaaccaagaggcaggaaatttattagggagtagatcctaggtccaggcagtttgaaaacaggcaacgtgaagcaaggctgggtgaggtgtctgggttccaagaagtgtgagacttaacaaagaggaagtaagttaaaggcctgttttcaaagtgagattttttggcatctcgtgttgcaccttgtaaactgggacttgaaccttaactgtactattttagtaatctatatgtttcagtatgtttaagaacaatgtccattctgagccattataatgtgtcatgcgctgtgctggatgagtgttttacctacctctttaaaattttcaaagtatacaaaagtagaacgaccaataagcccccatatacctgtcacccatattgaacaagtattactttatttaactctccctctggggcattcattactaaccagtttgagagatgagaaacaggctcagagattaagcagcccaaatcacccagaaagtaagtggctgggccaggactcaccggcccgactccaaagcccacgctctgaagggctgtagtgcttccagtttaaaatacttggtccctctgggtccctgtgcacatgtacgccgcctatacctcctcttccctcatctcaccagaaaatataaggggaaagtgcctttcttgtgacaaatccctgtgtccctccgctcccaggtcgcatagggcatggagctggagaactataaacagcccgtggtgctgagagaggacaactgccgaaggcgccggaggatgaagccgcgcagtgctgcggccagcctgtcctccatggagctcatccccatcgagttcgtgctgcccaccagccagcgcaaatgcaagagccccgaaacggcgctgctgcacgtggccggccacggcaacgtggagcagatgaaggcccaggtgtggctgcgagcgctggagaccagcgtggcggcggacttctaccaccggctgggaccgcatcacttcctcctgctctatcagaagaaggggcagtggtacgagatctacgacaagtaccaggtggtgcagactctggactgcctgcgctactggaaggccacgcaccggagcccgggccagatccacctggtgcagcggcacccgccctccgaggagtcccaagccttccagcggcagctcacggcgctgattggctatgacgtcactgacgtcagcaacgtgcacgacgatgagctggagttcacgcgccgtggcttggtgaccccgcgcatggcggaggtggccagccgcgaccccaagctctacgccatgcacccgtgggtgacgtccaagcccctcccggagtacctgtggaagaagattgccaacaactgcatcttcatcgtcattcaccgcagcaccaccagccagaccattaaggtctcacccgacgacacccccggcgccatcctgcagagcttcttcaccaagatggccaagaagaaatctctgatggatattcccgaaagccaaagcgaacaggattttgtgctgcgcgtctgtggccgggatgagtacctggtgggcgaaacgcccatcaaaaacttccagtgggtgaggcactgcctcaagaacggagaagagattcacgtggtactggacacgcctccagacccggccctagacgaggtgaggaaggaagagtggccgctggtggacgactgcacgggagtcaccggctaccatgagcagcttaccatccacggcaaggaccacgagagtgtgttcaccgtgtccctgtgggactgcgaccgcaagttcagggtcaagatcagaggcattgatatccccgtcctgcctcggaacaccgacctcacagtttttgtagaggcaaacatccagcatgggcaacaagtcctttgccaaaggagaaccagccccaaacccttcacagaggaggtgctgtggaatgtgtggcttgagttcagtatcaaaatcaaagacttgcccaaaggggctctactgaacctccagatctactgcggtaaagctccagcactgtccagcaaggcctctgcagagtcccccagttctgagtccaagggcaaagttcagcttctctattatgtgaacctgctgctgatagaccaccgtttcctcctgcgccgtggagaatacgtcctccacatgtggcagatatctgggaagggagaagaccaaggaagcttcaatgctgacaaactcacgtctgcaactaacccagacaaggagaactcaatgtccatctccattcttctggacaattactgccacccgatagccctgcctaagcatcagcccacccctgacccggaaggggaccgggttcgagcagaaatgcccaaccagcttcgcaagcaattggaggcgatcatagccactgatccacttaaccctctcacagcagaggacaaagaattgctctggcattttagatacgaaagccttaagcacccaaaagcatatcctaagctatttagttcagtgaaatggggacagcaagaaattgtggccaaaacataccaattgttggccagaagggaagtctgggatcaaagtgctttggatgttgggttaacaatgcagctcctggactgcaacttctcagatgaaaatgtaagagccattgcagttcagaaactggagagcttggaggacgatgatgttctgcattaccttctacaattggtccaggtaggggatgttggtgttatcaatggaagccttctcaaaaggaattgatttgcatatgcacaggcactccattcagttgtcatcaaatgccctttgttcagagcttcatcatcggcaaaagtagatatgatgaagctgcctcaaaaagtagtaaactgttccatgtacatttttactgtctcggagggtttgctgacaagggttttgcagacattagtacttcacgtttttaggagaattggccctgtgggaatactttgttctcatttattattttaatgatagattgcacttactgaatgctttcttgtgccaaggctccaagtgactgacatgctttcagtgtattatctcatttaactcttccaataactatgatggaggtcaaattgacatttgcactttttacatgaggaaactgaggtacaaagaggctaagtaatgtgcccaaggtcacatactttgaaagaggtagaccagaattcaaacccaggaggtctccctccagatcctgctcttttcactaccccaaatccttcacaaatccaccaccatatccttcatcagtctggtgtcaggattctggggctagagataaaaggtcttattctctgtgtatgtctgttacagttcacagaataatatctcatatctgggtagagtcttgaaagctcctctctgcagataggtacaggactgtatgtatttctgctccgtttctcatgatgttccctggggtcctgagaggacaagtgatttttctaaggtttagttaagaagttaaagaaagaagggggaacagttcccctgctcactttagcagttctcaacttatattgtactgcttgacaagggaaaagaagtaaaggaatttgaatagaaatgctattttagagcacagccttcattcattaattcaacaacatgtactgagaagactggcattaaatgagtacacacacaaatagatgtttaataccaaattgtgacaaatactttagggaaaactataccgtattatgagaaaacagtccaggggtccaagggacacttaattttgattaagagaccccgggacagttctgagtaagtgacatttgacctgagatctttaggattagccagactaaattttacacactaaactatctaatcactatccgtatttataggaagttctggagttttctgataagcattttggatagcctcaacttaaactctcaatcttcaccttcctgttagatacttgaaacattacatttggctttgttttcatccattaaatatattcagtagttttttcactagttgagatatttgtataacactaaagaattttagaataattaaagaatcttcagttttctagctctccataacagaaacaacatgaaaaaaacttggatgagctctgttgcaaaccccaaggctaacaggaattatttttcattgtcatgttcacaagtaaactttaaagagctggaaaatgaataatgttctttttagaaatgtgttaaatgaaagaggtcaatacataatattaacattgaatttgtggtcttaaatctgaagaagaatagtcatttgtaaaactacttgagacattttcagctatggctaaatgactcattcctgatcaaaatggtctcctagttgagatctgcactgtctttacagaagtgaaacctgaagaaggtcagaaagactcacatctggcttagaaacttaaaacattgcgaaaatgagtactggtggctaaaagaccacattctcagaattaaggcctttgatgcagctacagtggcacctatttgaccatacttttgaaaagcatttttgtaaacacttgtataattgaaacatgatgaagccactagtgatcatgtccaaactggaaaaccagaggaagaattataaatccttccaagaagcctccagttcctaaaatataaactagaatgtgaatttcttccgttccttaggaaaaaaggatacaccatttctattcataaagtgtatactctgagatatttaatattaagtctttcttcatgtttacatatgacatctatcctctaactttatatatgcttttataataatctgaacaatgtttgttagtgttgctgcttttaaaattatgaactatttcaaacttacagaaaagcacagagaacaatgaaacacctatgcactcacaagatttaattgtgttttttacattttatcagttcttcctcatcagtaatggagctgtactaagtcaatattctctaacatcagccaagtgatatgaaaattactaaacactaaaaatgaagatcaaattatacttaagaaaacataaaatcagggacttttggacagaaagctctgtacacaccacagtgtggcagagggtagtgattgctctgtgtggattgatctagagccactgtttacttgtagttaaggacctgtgagacagttcagtgacttgccagtgagatgccgaaaagggaagctatagggcttttaggatctttccatctaacaaatatttttctccttacgtgtattatactatatctccactgtccattttctttctcacattctctcttaccttccactttatagattggttacagtgtctccatcttccccctctacccctccaacaaaaccagtaagacctaattagagcaaattccctcacctcttcacctttgaatttatcagcagcacatgactgtgagtcaaaagtttcatcctctaatcccagttatgtcatcggctgctctatgatcttaagcaagtggttcagtctggtcctaagtgtcctctaacagacaggattaaacttaagtgactgttaagattttcatctttctagccgtgaagacccagtaaagcagagcaccagttcttctccatttccttttccctgattcaacgacatagagtacagtcctacaaatgccaatgtgttcttcctttaggctgtgaaatttgaaccataccatgatagtgcccttgccagatttctgctgaagcgtggtttaagagtaagtacttccattttgataatagcgtgaaattttaagttgccaagaattaactggtagacctaaagcattagtcataataatttcaactttcttgtacctgccctcagaacaaaagaattggtcactttttgttttggttcttgagaagtgagatagcccagtccagacactatcagcagaggttcgctgtgattctggaagcctatctgaggggctgtggcacagccatgctgcacgactttacccaacaagtccaagtaatcgagatgttacaaaaagtcacccttgatattaaatcgctctctgctgaaaagtatgacgtcagttcccaaggtacggtggctatattttctgtgttctctttccaaatgccttcatctccaaatgccattgttcctataattctttttcttcctggaatccaagttgcatcctcctgaaggcaccaagaacacatttttgagttttctgtctgcatggagtaaacaaatttaaagttctccttttacaagttcataatttttaactatatatttacatattcttaactgaaaaattaagcagcattatgcagatgtaagatgtagtttttaagaacagttgcatacacaaagattagatatttccaaatctttacctttttcttcacatctctgaatatgcacatacagttttcaagtttacagtcttataaaatgatgaatttttgagaggctattttaattttttggcatttcttcatctatatatctcagagtgatatatagagatacattcattcttccctatctggggtcctacatctgtaaattcaaccaagcatggatagaaaacatttgggaaaaaaattgcatctgcattgaacatgtacagactttttttcctgtcattattccctaaacagtacagtgtaacaactatttgcatagcatttacattgtatcagatattataggtatctagagatgatttacagtatatgggaggaagtgcataggtcatatgcaaatactataccattttatatcaggggcttgagcattcatggattatgatatctgcaggaggtcctggaaccaatccttacagacagcaagagacgactctgtatctgtgtgtgtgtgtgtgtgcataaaggtaataaacacacacacacacacaccaccttctctctcaagctgtttccaatatcttattcctaccctaagaaaacctgcccctgccctaggaaaattaatcactccttctctgtatttctgtagattttgattgatactacattaaattaaagtctttaacatatcttcctggtctggtaaactgtatcaaccttgaatctagagaatatctctttttcatttttatatacctagacctagcactatggctcattacatagacacttcatgtactcaaccagtattttaaactcctgaatatttaaaatttctttctccctttgattcttacaatgcttcctcctaaaaatgatgatggtaataataatattttatttgcattttaagaaaggaaaacatttgtactgaccctcattctgtcagtcatccagtaatttttaattcacatattttgcctttagaattttaaggctgtcacatccatcttctctacttctctacagaacctaacttcctcttctgaaaagaaattacagaaccctaaccaaattccatgtattattttcttaaaatgtctgttcctcaaatcagatggtagtttaaagtttaatgtgctggaaagaaaactacagtattaattccttagcatcaccctcagagcatacttctctacttggattgtgttggtgtctatgtgttatcccacatatattcacatatttctgtcccctgttgtagtatgtgtacatggttatgttgctcaccttaagcccaatgtatcttgccacctcatatggttagctcctcaaaggcagggcccacccacatttctcctgctctacaccagaacaaatatatagaatgctatgaataaatgtgttctcaggaaatgtaatagataatattgatgatttctggaactcacataactcttgtgtacttttgacaattacagttatttcacaacttaaacaaaagcttgaaaacctgcagaattctcaactccccgaaagctttagagttccatatgatcctggactgaaagcaggagcgctggcagtaggtatcacttggatgtctccatgtggtctttatgtcttgaagatgtctaacgtgcttgctggggcccagtacttaaaagctaatgtttatgcagagacagggaagctggagagtctctggatgggtttctcataagcccttgtctaatcactggttatgaaagcctcaataccagataatttcccttccatattttttaaaatcagcttgagatattctttgtatacaataaaaattgtccatttaaaatgtagaattcagggaacaggcgcggtagctcacgcctgtaatcccagcactttgggaggccgaggcaggcagatcacgaggtcaggagttcaagaccagcctggccaacaaggtgaaaccccgtctctactaaaaaatacaaaagaaaattagccaggcatggtggtgcattcctgtaatcccagcaactcgggaggctgaggcaggagaattgcttgaactaggacctaggaggtggaggttgcagtgagccaagatcacgccactacactccagcctgggtgacagagcaagactccgtctcaaaaaaaaaaaaaaaagtagaattcagtgagttttgagaaatgtatacaattatataaccaccgccacaatcaagatctagaacatttccatagacatgttacagaaaaagttctgtcatgtcccattgcagttagtcctttttctcctcccattctctgtgataatgcaacagatctactttctatcataaaatgccttttctagacttttattaagaggaatcatatagtatatagttttatatctgaattattttactttccataatgcttttaagattcattcatgttattgtatgtatcagtaatttgtttctttttatgacttagtagtagtcccttgtatggatataccacagtttgttttccattcattttttgagtaaatgtttaacagtggggtagttgggtcagatggtgtgtgtgtgtaattttacaagataccatttttccaaagtggttataccatttaaattccagcaatgtatacgatgagttctagttgtttcacatcctagcaagcacttgttatcatcagttttttttttgttttttttttttttttgagacggagtctcgctctgttgcccaggccggactgcggactgcagtggcgcaatctcggctcactgcaagctccgcttcccgggttcacgccattctcctgcctcagcctcccgagtagctgggactacaggcgcccgccaccgcgcccggctaattttttgtatttttagtagagacggggtttcaccttgttagccaggatggtctcgatctcctgacctcatgatccacccgcctcggcctcccaaagtgctgggattacaggcgtgagccaccgcgcccggcctatcatcagtctttttaaacttagccattcaaatgagtatgaagtggtatctcactattgtttttatttgcatttccataataaggttgagtgtctttctatgtgctcattttccattagagtacattcttctgaaaattttctattcaaatatttcaccagttttttaggtgggttgccttctttttttttttttgagacagagtctcgctctgtcgcccagggtggagtgcagaggcacgatctcggctcactgcaagctcctcctcccaggttcatgccattctcctgcctcagcctcccaagtagctgggactacaggtgcccgccaccacacccagctaattttttttttttttttgtatttttagttgagatggggtttcaccgtgttagccaggatggtctcaatctcctgacctcgtgatccacctgcctcggcctcccaaagtgctgggattacaggtgtgagccaccgcacctggaccttagttttagttatgagagttacttatataaactggatacaaattctttatcagatatacattttacagatattttctgttagtctgtggcttgcctttttattttcttagaggtgtctttcaaagcagaagctttaaattttgattaagtcaaatttgcaactttttcttaaatggtttgtgcttttagtgtcttatctaagaaatctgtctaggactagcacagtgtctcacacctgtaattccagcactgtgggaagccaaggcgggaggatcacttgaggcaaggagtatgagaccagactgggcaacatggcgagactccatctctacaaaaaataaaaaaaaatagccgggcatggtggcacgtgccatagtccccactacttggaaggctgtggtgggaggatcacttgagctcaggagtttgatactgcagtgagctgtgtttgtgccactgcattccaacctgggctacagagcgagaccctgtttcaaaagaaatgaaaaagaaatctatctaatccagtgcctcagcctggggtaatccctctgtctgccaagggacatttggcaatgtctgaagacattgttgatggttataactgggagaatgctattggcatctagtgggtagaggccagggatgctgccaaataccctgcagggtacaggatagtcccccagaaccaacactatccaccccaaaatggcaacagtgccaaggttaagaaattctggtttaactcaatgtggcagatattttttcttagaagggttatggttttaattcttacattgaagtctgcaatccaatttgagttaatttttgtgtacagtgtgaggtgaaggtcagagttcatttttaaatatgaatatccagatttttcagcaccatgtgttgaaaagactgttttgttttgttttgttttgttttgtttttcctggagaactaccttggcacctttgtcaagtatcaactgaccgtatatgtgtgggtctacacctagattctctgttctgttccactgatctaaatgtctgtccttacatcaataccacacattcttgattatgtttaaataacaaagcacttcatatacgtgtgcttatacaggcaacagtatacttccattaacccccgcatcctttgcattatttttattatgatttcaacttctatatatgttataaatggcacaataagttactatttttgccctaaacagttaaaaaatagacttaacagacttaatagatgaaataatttttaactattcacctacatatttaccatttttggtactctttattgccttatatcggtccacatttccttgagcttctaacatcttttctactgcaagtttgctgacaataaattctttcagcttttgtttatctgaaacactttttattctgctttcatttttgaaaaatattttccctgaatatggaattctagattgactggtttttttctttcagtaacatttttttctggcttgcatattttctgatgatgagtcttatctttgattgtgtctgcataatacgtctttttccccaggctgtttttaagattcttttttatttctggttttcagcaatttgattatgatgtaccctggtatgggtttcctttgtgtttaggctgctggagtctatggagctccttgaatttgtgagtttatagtctatcaaatttggaaatttttcaaccaattttttatgttgcctcttttctctcctctctgagacttcagttacagtaatttagactgctggactctgggctcagtctggatttccttcctctgtgctgtagcctagaaacagcccccaggcagtaatctggggcaattacagggctcacttcatttgtcttccttttcttggggatcacggacctacactgcctgttcaatgtctgaaaagagttttatatattttgcatagttttctagttgtttatggcaggacggcaactcccgtagcagcgaagccacatgagaagatgaggaagttcttcccctgaatgtttaattttatatacaattaccagcaaactggccctatagtaaaagcacacactatccactgtccattatttaaagattggtaggaattatgacatattaatacagtttcaaattgtgtttgcttctttaaatgactacatcacaattttgatctgtggtgaactcacctttgcctgaaacacctaccttttttatgtttaagtgagtaactgccaagccacatttcccctgccttgaatttatttagatgtatgaggtttagggggagggcgtgttgtacctaaatgccagattttccatttatttctgttaaatttcatctgcttagatgtagcctattgcatctgattctgcaataatagtttttttgacattgtggtagcattagaattcttttttcaaattaaatctcagaaggcggacaaatataatagccaggttgctgtctattaaagaggatgtgggagtgtcagagctctgtgtgcgtggggagggtgagatctgccatacctcttaggcacttccaaagactcttgtggttctttggagcacagtttgagaggcactggtttaagagttgtgaattcgctctcacatggcatttccagatttgctcaaaacaacttctgtatttttacccaaatattgaaaatcattctccaactaggactttgtccttgttgtttatagtgatgttttgcaagagaatttgtgtctccaccatgtatattcgttattcattgtgtgtggggaacatgtgactgcttccttacagattgaaaaatgtaaagtaatggcctccaagaaaaaaccactatggcttgagtttaaatgtgccgatcctacagccctatcaaatgaaacaattggaattatctttaaacatggtgatgatctgcgccaagacatgcttattttacaggtatgctaattttaagattgttttcaattatctgaaaacaattctatattacatcaaaaacatgctttctcctactggctctattcccactctcttctttcaagtgatgaattgtgatcaaatattacatcatagagagttttcacttggggaatttggctgcagactattagatatgcaatctaatgagcattatggttctgtccaagttgcatatctaacactcccaagtagccagatatacctccctcacctaatgtcttttttatacaccccattctaagcttgataacatagaaaatagccatatttatccccagcactcacttcattcctgcccatagacatgtctgcacatctctaggcactcttttagatacatctcctctgatgcacataaacaaatcaagcaaatgattttatgggaaggagaaagatgaacaagtaggtcaccacagaaatcctgcaggtaagtgacaagagtgaagtactgttagggcagaaggtgaatggtcaatatatcagtgctaattattttcatattttctaacatttctagataaactttagcttcacaagtctgtaaagtaatattctccagattctagttggtcagtgttgtagaggtaataatttctaatacttaatatggtttatttgaagtagacaaattacattgatttcaaggtagcctatttaaaactggtcatgtttccaattgtaagtttctgtttttacttatttctaatatagaaacaggaatacctttgctttgcctttgctttgctttcaagaatgatctatgttttgtccaggaggtattttagaaaagaaaaagagaaatccttcaaactttttgcaagtttattaaatttcaaataaatctgtagaatattttgaattgtttgaagatggacactttaaaaacacaaaaattaccctgttggtcctctcattttgagtgaaagtttgcctttgccctttatgtactttgtggttttgtttttttttaatttttttaagatgaggccttgctttatcgcccaggttggaatacagtggcacgatcacagcccactgcagcctcaaactcctaggctcaagcaatcctcctgccttagcctctgaagtaactaggactataggtgtgcaccaccatacctggcaaattatattttttgtagagatggggtcttgccatgttacccacgctggcctcaaactccttggctcaatgaatcctcccacctcagcctcccacacaactttcacagtcttctccttttctttcccttcctcataagaaaaccaacagtgtggacctggaaaatagctctctggtcaaaaaaaacctctctgcccttcactcaacaaaaacatagcctttccttctctgggccaggcactagcccacaatctccattagactcttcatccttctataggaatgatcaagattgtgaaagacaccatgacaattgccaaaattgctgggattctaggcacgagccagttaatcgccaaaattgctgggattctaggtgtgagccatcatgcccagcctactttgtttatttgttggggcacatagtttggcagctaagggcaagttatttaagctctttaaggctttgttccttcacctgtagaatgggaataataatcctatccacattatagggcaatgcaaggatcacacataaagcagcaatcagtatatattcgctatcattatcatcattgtagttactgctgctttggttattgcctttgataaatatgtgtaaggatgttagagttttgtggtaaaatagacacaagtaaagcagaacatttgaacagagaggtgatgaaccacagctaaaacccactccaaaagaaatgtattggccaagcatggtggctcacgcctgtaatcccagcactttgagaggccaaggtgggcggatcacttgaggtcaggagtttgagaccagcctggccaacatggtgaaaccccatctctactaaaaatacaaaaaaaattagccgggcatcatgatgcgcgcctctaatcccagctactcaggaggctgaggcaggagaatcacttgaacctgggaggtggaggtggcagtgagctaagatcacaccactgcactccaggctgggcgacagagcaagattccatctacaaaacaaaaacaaaaacaaaacaaaacaagaaatgtatttatcctcttccccaaggtacatttcggaaaacaaaattaacaagctcacaaagaagagaaactttagagtaccagattgaccaataaacgtacagttgttacttatatgttttacatttactcttatattttgtgttactagatatgattgctatttttaagggagaagaaaaatatattaagttaatatatatataatataaacatttctgtgtttcgatgcccagattctacgaatcatggagtctatttgggagactgaatctttggatctatgcctcctgccatatggttgcatttcaactggtgacaaaataggtatgtagttacctcaggagatgaatagacctctcagctcgtttgaaaagattataattccttcagtgtagacatttaataactgaaaaatcataatcttaatctgtataaaaaggaagaaaacatttctatgctggtgaatgtgactctcaatttaatgtggatatattgaaaatacatgaatgcatgattcaaatccctgtgactatacatggaaatgattttagtaagaacttgttccctcctctttccttctccatctctaaactttaactcatttcattacacattaaacttttctctcacaaaaaacatttaaaaatagatggaaagatctgtcacttattttagtattccagaattcacattatcaaagctattacacactctactatcaggtatttttatagacattcagcattagtttcagtcaaacatatgtttattcaagtttctgatctgagaactctacaaaaccatttacatttaaccctgtaatttaaaaaaggaaaaggcacagattgccatctgaggaaggatatgctcagcatataaatgcttttatttattactattcaaaaccagccctttcctcttgtcattctgggatattgaaaacatatcccacacaacttccatatcctccttctttcctttctattcctcataagaaaaccaatagcatagacctggaaaatagctctctggtcaaaaaaaaaaaaaaaaaaaaccctctgcccttcactcaacaaagacatagcctttcctcctctgggccaggtactggcccccaatctccatcagactctgtgcatccttctgtaggaatgatcgagattgtgaaagacgccacgacaattgccaaaattcagcaaagcacagtgggcaacacgggagcatttaaagatgaagtcctgaatcactggctcaaagaaaaatcccctactgaagaaaaggtgagctcatgctttttcccagtctaatggctccttacaagttgtcatttatatagcagtagtggcttcaagttttcagagaatctgccagtgtcttgcctcctgacatattagtgaagttttttacttgtgaaataatggaggttttaagtaccctcccgtggtgacagcatatctgtgtgaaacagaggcactcagttcaggactccatgagcatttgcttctcttttgattatcaggcatactttgcttaaaatttggttctgtaaaataatctgttagcactttttatggctatctatttttgttgttcagccaagatatttagttaccatgtataaactcttacgtacctgggaaatacaacatacacaacaaagtaatttataatttactgctgaactctaatctaaatggtaaatcatggatgctgaaaatgtcacttccaccattccttggaagtgcatatgctcaatccttcacaagctgtgttttagctgtttggctgtcgtttaaagttctgctgcacaggattagcacttctcatttgcatggttagcagccttttggggaggaaatataatgagtagcacttattaatctgttatacatggggatctgtgaacccaagcatactcttagtggtcacaagcaaaacatgttcacaaatgaaggagaaattaccatgggttctatatagttgttggcaagtgatgcatggagaggaagtgaaccctttgattaaattactgttgccctttgactcttgtttcttcctcatgccattgtgattcactgaatcttcacctaaaatataagcagagcaatgagaaagttggcaattcatagatataatgctaatgaaatcaggcacaactaacttgctctctgaaaatggtttccagaatattctctttttagaagtcatttgtagattcatgatgctttttgtagttagaagacaactaatattcaaatgcattttaattagtttcaggcagcagtggagagatttgtttattcctgtgcaggctactgtgtggcaacctttgttcttggaataggcgacagacacaatgacaatattatgatcaccgagacaggtgagtttatttagtgcagaataaacttttattgtggtaaaatatatataacataacatttactattttaactctaattaactgtaagtgttcagttcagtggcattacatatgttcaccttgttgtacaaccatcatcaccattcatccccagaatttttccatcttccccagctgaaactctgtacccattaaacactaactccccatgcctccctcctttcagaacggagtagtctttaaatggagtttaagactggagcacatatttagaagtcattgtgtagggacactggtgcttcagttactctagagcagtggcccccaacctctttggcaccaaggaccggcttcttggaagacaccttttccacggacaggggtgggggagcaaggatggtttcaggatcattcaagagcattacgtttattgcacacttttttttcaactcacttgccactataaagcctgccaccagatgcagctcaattttcacttgccactcactgagagggttttgatatgtaaggaattgatttattatggtctctgtgcagtgaaacctctctgctaatgttaatctgtatttacagccactgcccagtgctagcatcaccacctcagctccacctcagatcatcaggcattagattctcataaggggtgcacagtctagatctttctcgtgcacagttcacaatagggtttgtgttcctatgagaatctaatgctgcaactgatctgacaggaggtggagctcaggcagtaattcaggcaatggggagcagctgtaaatacagatgaagttgctcacttgcccatcgctcacctcctgctgtgtggcccagttcctaacaggccatggacctgtccatggcccaggggttggggacctctgctctagagagaccacctcacttgaggactaaggtgtgagtgaaggaggaagaggcaggaaatgagtcttaagaaggcaaagttagagggaccgctggaaaactaggagagggtcatatcccagaagctggcgaaggtgggagtgatcaccagtgacagatgttgcagagaaagaacagaaagaactcatagatatccttaaatctccctaacccactccactttagtggttcactgtccactctgacagtagtcagtagtggccaccaaagcatgagatttttctctatgaatttgggccattttaagagtagagtctggaaaaggcatcagatggggacagattgcttacttcctatgagaattaaaagagataatatatttatggacaatagaaatgataaagggctaaacaaataagatgatgattattgtggtggtgatagtagtagtggtagaaattgacccaaaggagactcaaaatgatttgcttctatcatgctgcccaagtttctgagatcagatgagcttagatacattcaggatggtatggccgtagatggctactcaaaaggaaaaggtgaataacccctgcccccaagcagagtgaaacatcagtctatcctgagttgcgtaaagagcataagagagtcttagggataatgatgacatagtggccagagagtttgatttatgtttctaagaataattttgagatgagaatcttatagtggcatctggctgtcatctaaagaacaccagaaggatatcaaaaacatacttggttcaaagaatgttttgtggctacgactttcacacacctgctaagacgaaaaatatcacaaactgacaaacattgtaaaaaatgctttcaacacaagatagctcatttttaggcaactcaaagaaatattttaaggaacaaagtgctgtgccactgtaatgatgtcagatactttcttctcttaaggaaacctatttcatattgacttcgggcacattcttgggaattacaaaagtttcctgggcattaataaagagagagtgccatttgtgctaacccctgacttcctctttgtgatgggaacttctggaaagaagacaagcccacacttccagaaatttcaggtaagtcacctccttcatcgcctgctgagaatagcaccgaagcagatggttcctgcagcactccgcagccttcacctctcactcagcttggaggccagtccagcctctacccctaccctcttctggcatggccaaccctacctcctccctttcacttccattcattcctttcccaggtgcaaaatgacacttctcagtaatcctcccacctaaaaccaaacagaagtagaaatatttcataagcagtgggatgggcaaatgtggaacaccaggatgatgctggcactaaagagggctttcaggaagggtgtctgctgagcaggttagccactagatatttgtctattcaagaccttagctagaagactcaaattttacacatatttttcagaactcacaaaaggttgtgagcttctcttggtttttgctacaggtgaattctcgatgtgccaactgggcttatctcatttttataaggcagaatacccaatatttcatttgaaatcttgttggtttgaccacaagttctactaagacctctagcttttcctgcttacctgtaaacaagctcctacatgagtctgtccatctccctgagagtgtgtagatcaggggagtccaatcttttggcttccctgggccacattggaagaattgtcttgggcaacacataaaatacactagatagctgatgatctaaaaaaaaaaatcacaaaaaagcctcacagtgttttaagaaagtttatgaatttgtgttgggccacattaaaagccatcctgggctacattcgggttggatgagcttggcgtagattctactggctttccattccttcctggtctgtatccagttttgactatcaaatacttcaaataccaaagagaattaaatactggcaaaattaataacttaatgaacataattcataacagttgtaactactactgtaatatacctatgttatagcaatacaaacacaaaacaaagacaaggaataattacttttatgtacatttgccttgggtgccctttaaatagccacctcccttagtacatcttaaacatgatttgctttgcattgcacatctcagacttgctctcttttccctgagtctcttcttgagtccaaggttacccttgggagacgacatgacccttgaagttcagtagaacaggaagtaggatacattgttttgaaacctgtctgttcttgtttgttctcctgactgattttcaatttggtgattacaagacttaccctcccacagttccagtggtgttgtcagagaaactgagatctctgtggccagatggtcttgtgattttttagtgtgtgtttttctgcataaactcaattgagtttcaggctatttccagggacttgacacatttcagtcctgtttttctttaaagttaaaaatcacatgttttgacaacttcctggaacagagaaatggttccaaaaaaaaagaaaaccctggaagaatttcaccatttaaaggggggaaaacactcatgtcttctctcctgtcagcggggttcatctgtttgtctgtttgcttcggacaaacagagcagcaatgaactgcaacttaaagatcagacatacgcaaggaatttggcctcattgacgactctccttttttttttttttttttttttttttgagacggagtcttccctgtcacccaggctagagtacagtggcatgatctcagctcactgcagcctccacctcccaggttcaagcaattctcctgcctcagcctccagagtagctgggactacacgtccgcgccaccatgcctggctaatttttgtatttttagtagagacagggtttcaccatgttggccaggatggtctctatctctcgaccttgtgatccgcctgcctcggcctcccaaagtgctaggattacaggcgtgagccactgtgcccagccgactctccttctttttgtatatatgttatcttcctttttgccagtaatttttcctagaatgactgcacatctgtcctgttgctgacaacattcccatagaccccctggtgcccatatcaccccgtcagatcccagcagtacttctctttttttgctgttgttgctatttttaagtttcaaaatatgctttcacaaaaaggtttgcagtatagggaggccaaggagaggtttcttcccactatcggcatcttccacccaaagcaacaaacctttgcggtgaggctttgtgcagtctgtcctctcagtctggagtatttctccatccttagtgaccaaagtttgtttctcaagccattaaaaccttttttactaaagcaacgtttaggcagtgtgctccactaaaaacacacttttgtacatttgttgtacttgtgtgtgtccgtgttttggagtactgttaaacatacgtgttaagcatacatgttaaatgcctgtgaatctgtgcacgttgagccttaagcacacatacagcataacaaggtggttgaaaggatgggctttgtagtggagaaacttgagtttgaatgctggacctgcgacttaataaccacatatatgattattattcatcctttcataacatcagtttcttcatctgtaaagtgggaataataagacctacttcctgtgctttttctagggattacttaaatgaaatattcagaatgcttagcccagtgcctagatcatagcagaaaatcaataaatggtagccgccattgttgtagtcatcacagtgtgtcttcaaactttgaaaacttttaagttgagaaaccatttttgaaatgagatctcaggtaatatataaaacaaagtagcatgctctgcttacagagtaagtggggttccaactccacttacacctgttctgcttccccttccccaacccctctctgcttactctctccctgtgttccctcatccttcacaacaggaaaaaaacctgaacaccacagctttaacatacatatatgcagaatttccaaagtttacagcatgacaaagatggacagcagagtttttcatcatttgactatgaccttgtggtaatttttttttcttttacatactgctaagccttccaaaaagattttctgtttcttggttttatgttttcttttagaattgaagttcttcaagatcagggaccacatctctaaattctccaaataatgtctcagaatcttgtataataaaggctgccatttttagggaagctgggaaatgttgtatacatttgcattttgaattaaaggtgtcctcatttccagtgaatcacttattttgaattgataaggttaactaatacatgctgcgtatttgaataacctgttaggaacaatggagaaaaattgacccacttttttgttaagggtggggtgagcctggtccacaaagaaaaacatacctaactagtggcttgagcatggaagtaagaggaactgaaataagctctactgcatcccacctctctgcttcccaagggagctactttagcctaggaccatagtcacacttacttctagaataggggagagttcaggaacaagctataattagatagagaaacacaaaaccaaggcccagcgtttgaacccaggagtatctattagccattggagcagcatcctacaaacaggtgctaaacaaacacatttcaatggtgacaattttgataaattctccacagaaaaatctcccttatgggaggaataaaaaagaaaagtgtttttactcattggtaatttattctagaccatgttattttaaatttcactgaacagttatagaatatatataataaacaaatgtatttatatcattggcaaatgaaatttggcttctaagttttttaaatgtcagaatgtgttttttattgttctcgttgttttgttttgtttgagacggagtctctctctgttgcccaggctggaatgcagtggtgtgatctcggctcactgcaacctctgcctcctgggttcacaccactctcctgcctcagccttccaagtagctgggactacaggcgcctgccaccacatccagctaatttttcatatttttagtagagacggggtttcaccgtgttaaccaggatggtctcaatctcctgacctcgtgatctggctgcctcagcctcccaaagtgctgggactacaggcgtgagccagcgtgcccagccccgaatgtgttgttttttaaaattttaaaactagtaaatgttgtttattaaaatcaagagccagcaaaatattgaaaataccaaaagacataaaaattcattatcctgctttccaaagataatactgtcaacatgttagtttctagaagattgtaaattaatcagcatttgcttaaaaactgaacttaagaaatagatatgttcgtctcttcaaattgagtaaggctgattaacatccatgagatggtagtttgtcattctgaataaaatctaaatatccaggcttggcctgctaggccctgtgtgaggctgtccctccagcctcatgccacactgttcccctcatctgctccctcatcactgtggccttcctccacatcttcccccatcccagctacccactgctttcttcccagaatgctctgtgctgccctgtggtctcagcataaatgtcattctgcagagcagttttctaaatcaggttccctcctgttaccctttgccacagtcccctgccaggtccttcattgcatgtatcacaaaatacatttatttgtactggttttctgtttgtctttccctatcccaactgtgagctctgtgcagcagggccacatgtgtcctgtgtccctcacaaggggctgagccacggtaagcactcagtaggtgtttgctgagtggagtagtggagggacagcaccttgtaggggaggagctggatcaaactggataacctctggggtgtcttccttccatatcatacattgtattctgtgagtttcacaataactcaggcccagattgacagaccatcatcacatggaaggtaataagccttcaggaggcaggttaacatgcgtacattggatgaggaactaaatccaactgtgaaatctaatgtttcattaaataatacaaatatgtgagtgtaatatggtacatattcacatttttgtagagatttccttattgacataaatcttacatatttctttccagtcagagctgtaccttttgccaagagaacagggcatggagtatatacacatagtgtacattcaatacaggacagtggataaagggcaggaacaactcgttcttttataaacaagcattttggagatgctctgtgcacacagtaggcaccaagcaaatctgaagtcatcaggggagccaaataacacatctacagacaaatctatgcaaagcaggtcgtttgaggactgtctttaaaaggcacttgcccctagatgtcactcttaagaagcattttataggagaaaagtctggagcccattcgttgtgttattttaatctaggatgactgtggaaattttcttgccagttttatcaggcccaccctgtttccagttccgcagtcttatccccatgccagcgtatacccaagcctccaacctggaggctcagccacatgcccagtctctatgcagggtcctgactcaggaggtttttaagaacctttattcaaccagagtccatctcttctgtggtctagctctactcttgggtcccacattgttttaactgcttctgtttcagtttctccaccagaggtctctctgtttgttacccagctgctagaactagggccctaatccctcctgtcatttttcttgctggagacttgagtattctcccaagcccagccacagggaccacagagaccttgtaatctgacattcttccaagggctgcagccatctcagcatcatttccggtcactattctctacctccccttcctttgtgtgataaccctcatccttgtctatacttataacctgctaggctggattttctcagcctcctgctctagcctgttatagttaccaggccttattcaccatatccaaaataggacactaattcaacgcacactgactaaatacatactacagtttaggcaccgtgccaggcataaagaaggatcaggtactgcctttggcaaggcaagatattttcccagtttggtccctttcaaatacagttgttccctaattcatcctgattttaaagtagtgaatcttgtccaatattgaacttggcttctgaacattaagcattcatccatcttatatatgcagattatctgtagtgtatcagacactgcattgggcataggtgagacaatagagcatggccccagaacatggcaagaaagctacttacacaactttgtgccaagaaataccttgtgctaagagtgtccacagtggtttgcagagggagcaattaatcctgccctagaggatagaaaagggctattcagagaagcatgtgtttttctcaggccttaagggatgaattcagtttcatttttccaggcagatacagggaagggagggaacatccagacagaaagaacagcacgagcaagtgcatgaagttagaaaagtacatacaatcagtatttaggaacaagaagtatatttacctggtatggatagaaagtggtatttctggaagtgtgtagtagaatttgagtcaagaaaggaaatttgggtccaacttgaagcagtacataggctggattagagaggtggagggtagagcaaagcaaagaagtcatttggagctcattcgattaatcacaaataaccataattaaggtctattataggtcaagcaggagatgaccagttcatctgtcacccataatgtactgagctgataaaggattccgtcttgggatctgcaccccgacccactgactaggccaggctcaggctcccctgtctcagtgtgaagactttcagtactcactatctctccatgttatgcactggaagatatcctcaaagaagggtctgatttcagccatttgtaggagtttgaatatgttggtgtgatatctcccccatatgcagacttgtgcggcttgtcaaactgttaggactttattaagcttgtcaaatttaaattactattctggaaaagatacgaatccaaaactggaaagataataaccttttaattgacatcattctctcaatatttagtttctttcagaacattttgtctaacatagaatattgtcagggacattgtttaccatattacaaaacatactctctctattaagatcttcttgtgaaaattctactggtctcagtttctagaaaagctgtgcttctcctaaatagagatgttttcttttaaattttctgaacattgactacagttaacagattatgtccttttagctagagatatatttgaagacttcctatagcaagtactgtcatgcattgcttaacagtggggatacatacagagaaatgcatcattaggcaatttcgtcattgtgtaaacatcagagtgaacttacacaaacctaggtggtagtcttccacacacctaggctatatgatatagcctattgctcccaggctccaaacctgtacagcatgttacttactgaatactgtaggcagttgtgacacaatgttatgcacttgtgtatctaaacacatctgaacggaaaaggaacagtaaaaatatggaattataatcttatgaaacaactatgatagatgcagtccatggttgaccaaaacattgttatgcagtacatgactgtatataggacttgtgatgtacagttttaaattagcctccttccccaacccattgtggattgtttcctttccttttttcagccaattctaactaatgctattttgacttttgtatctccaaatagtccaccttaaatcctttttggaacaaggctgaaggataaatcacacacacacacacagacacacacacacacccctacgtgcacgctatcagaatattgactaaagtagaatagcttattgtagcatttaggtttctaatgtgcttctagctaaatattcgagaagatgacagtacagcccttctcctggtaaacagagctagtctgagaatcacttttcaagtacttacagataaaaatcctaattcaaactcatcaaatgcatggccaagtaccagacacactcctcttttggatttaccagaaagtgtgctctcatgcactgttaggtctaataatcagtgaccttctctgttttgccaaaataattcctaaagactggctagccaatgcattgatttttattaaaaaaacaaaataacaaaataaaattctctgcctttgactggaatgatttttatccattgtctccttcctctagcagacagaggcaacattactatttaggaaaagtaagtggaggttccacttcatttctagatgaaaatggaggattttgatgttaagtatttcatgtgacctcagacagtctgtagcagccacagctcatcagtggttaataaattagtagattgtatataaaagtagtttgttttcagtttagtgaactgatagttggggcagttagcaaatcaagtaaaagtttgggccctgaaatgataatgaattcctttgttcccaagacttctaagggcagtagctttgtaaaaacaattctttctgttagtactagatgctataattaaggcatttgaatcaacaatgaaattgagagcagatgtactacgtaggctcaatctatttattagctactaatggagaatgttctagctaatggcattaataataatgtaatgttccccacatttgtagtcattaacaagtgcattaaaccaagtcctcgaagtcagatttttcccttactcttcttctctcaataatacaaatccttcaacagtcagttgagaaggagagaatgaggatgtttgaggtcaaggagaggcagccctggcagaagggaaaattacagccagtaacttctgtgttctgtgttttcccctgagctccccaggccacatcctcatagtccctgaaaccacaggcctctaggccaaggtagtgtcagaacactcccacagaccctgtggctgagtccaaaaggcagaaatgaaacttctgggactgagcgggcagggcaggtgctcggctgtgccccccagggtgagagaaccacctgcaggaagccagtgttgctgtatgcttccatcctgcccacctcagtgggccagcaccatgacagcctccctttgacactggttggagtgaggcttatccccaactccaacctacctcaccccctaggcctttactaagagaccttgtgggcagatggtctagagggacagtgagccccttagcgttgaacagtatgtgtattcaataatgcagctcctcgtggtattgattagtaatcatagccaactacttatgtagcacttaaatctcaccacaacaacatgaaatgggtatcattcttattattcttaatctatatttaaaagaggttaagtgacttctccagtgatatatagtttaccagtaataaagccaaaattagaattcattcagcttgatgtgaatctgtgttgttaaccaccacagcacactgcctttcagcaaaggctgattaaagctgcaccaagtctctaagtgtgtacagcccatcagaatctcgacactgtgtttgacaagcatgggacgtgcagttaaactggggaagaaatttctttctcatagaagagatccttgtgtgtgaaaattagaactatctgaataaattagaatcaacagaaattctttatgtgagtgaaatagccttcgagaaaagcaggacagttatttcctttaacgcctctccttgggtacagcagggataggtgaattcctgcatcactgcttaacaagtatttactgagcaccagtggattggtgttataataacttggcctcaggttaatttccctccttgaaaatgttctattaaaaagagtttgaccacacagtgggctcacacagcaggggatttatgtggatcccccagtgtatggaaggacagaaaataattaaaaatcagaatgtactctaattcaaaaccaaaaggcgtccccatctatgtccttgtgaaaattgtgcaagttggcaaattaatgaggctgttgcctggggtgaagtctgcacttagcctgtataattactaagaaatgagagagacctcagtgggtcctacggatgagcaaaagaaaataatttccggacataagtggagtcattaagaatgcaagagcactaatgcactggggccacttccaggggacaagtgatggctgggcagcagcagcaacagcccacacaagtctcccgcttcttggtgaacagggaggaaatgcagaggggatggtaggcaagggagaggactgacgtttattgagccttcactatgtaccggcctccatgctgggcgctttatgtatattgtctcacttagaaaatgccagaatattccatgggttttgtattgcttaggatgatgtgtaccctgcccagccttgacatacagaatgacacaagcctgacctcaattatcattgcagttaccctaccacacacaaatgtcacagacaatatcagctaaaagcaaaagaaaactcactattaatattttgtcctataaatttatattcttttttctatataaatattttgtgttaatttaccaaaatgggatgcattgttttatacctacctcttaaacacttttacatgtttattaaatatccttctacagtatctttctagtagttccaggacatgcaattttaagtactttttgtgaatctttttttatcagtcccctattgtaggacattattaatagattgctttcaagtttccacaattttaaaccatgttctaatgaacatccttatagataaatcactgcaaaattattcagtatttttaaagatagattcctagcatggaagttgctgggtaaaaggatatagatgtttttaaagccaggtttattgaggtatgttttacatagagtaaaaatcaccctttcttttatttttggctgggggtacatgtgaaagtttgttacataggtaaacacatgtcacaggggtttgttgtacacatcatttcgtcacccaggcattaagcccagtacccaatagttatcttttttgctcctctccctcctctcattctctcccctcaagtagatcccagtgtctgttgtttccttccttgtgttcataagttcttatcatttagctcccacttataagagagaacatgcagtatttggatttctgtctctgcattagtttgctaaagataatagcccccagctccatccatgttcccgcaaaagacatgatctcattcttttttatggctgcatagtattccatggtgtatatgtaccacattttctttaatcagcctatcattgatgggcgtttaggttgattctgtgtctttgctattgtgaatagtgctgcagtgaatatttctgtacatgcgtttttatggtagaatgatttctattcctctgggtatatacccagtaatgggatttctggatcaaaatggtagtcatgcttttagctctttgaagaatcgccacattgctttccacaatggttgaactaatttacactaccaccaacaatgtataagtgttcctttttctccacaacctcgccagcatctgttactttttgactttttagtaatagccattctgagtggtgggagatggtatctcattgtgcttttgatttgcatttctctaatgatcaatgatgttaagcttttttcatatgcttattggctgcatgtatgtcttcttttgagaagtatctgtttgagtcctttgcccacttcttaatgggattgtttttctcttgtaaatttgtttaagttctttatagatgctggatattagacctttgtcagatgcatagtttgtaaatattttctcccattctgtaggttgtctgttcactctcttgataatttattttgctgtgcagaagctcttaagtttaattagatcccacttgtcaatttttccttttgttgcagttgcttttggtgtctttgtcatgaaatctttgcccattcctacaaccagcatggtattgcctaggttgtcttccaggatttttatagttttgggttttacatgtaagtctttaatccaacttgagttgatgtttgtatatggtataaagaaggggtccagcttcaatcttctgcatatggctagccagttatcccagcaccatttgttaaatagggagtcttttccttgttgcttgtttttgacagctttgtcaaagattagacagtcatagatgtgtggccttatttctgggctctctgttttgctcctttggtctctgtgcctgtttttgtaccattaccatgctgtttttgtagccttgtaatatagtttaaagtcaggtaatatgatgcctccagatttgttctttttgcttaggattgccttggctatttgggctcttttttggttctatatgaattttaaaatagttttttctagttctgtgaagaatgtcatttgtaatttgatagaaatagcattgaattcctttgggcagtatagccattttaatgatattgactcttcctatccatgagcatggtatgtttttccatttgttggtgtcttctctgatttcttagagcagtgttttataattctcattgtagagatctttcacctccctggttggctatatccctaggtattttattctttttgtggcaattgtgaacgggattgcctttctgatttggctcttggtttggctgttgttggtgtataggaatgcgtgattttttacactgattttggatcctacaactttgctgaagttgtttatcagctggaggagcttttaggcagagactatggggttttctagatataaaatcatgtcatctgcaaacaaagatagtttgacttcctttcttcctatttagatgttctttatttcttcctcttgcctgattgctctggccaggacttccaatactatgttgaatagaagtggtgagagaggggttccttgtcttgtgccagttttcaaggggaatgcttccagcttttgcccattcagtataatgttggctgtgggtttgtcataaatggctctcattattttgagatatgttccttcaatacctagtttattgagagtttttaacatgaaagggtgttgaattttatcgaaaggcttttctgtgtctatggagataatcatgtggtttttgtctttagttctttgtatgtgagaatcacatttattgatttgcgtatgttgaaccaaccttacatcctggggatgaaacctacttgatcatggtggattagctttttgatgtgctgctggatttggtttgcaagtatttgaagatttttgtattgatgttcaccaaggatattggcctgaagttttcttttttgtgtgtttctgccaggttttggtatcaagatgatgctgctctcatagaacgagttggggaggagtccctcctcaattttttagaatagcttatataggaagggtaccagctcttctttgtacatctggtagaattcagctgtgaattgatcaggtcttgggcttttttttggttggtaggctatttattactgattcaattttggagctcattattggtctgttcagggaatcagtttcttcctggctcagtcttgggagggtgtatgtgtccaggaatgtatccatctcttctaggttttctagtttgtgtgcatatttgtagtagtttctgatggttgtttttatttctgtggggtcagtaataacattcccttcttcatttttaattgtgtttatttggattatatatatatttaggctactttatatatatattaaggatagttaagtcttcttgttgaattgaacccattaccattatgtaatgccattctttgtcttttttgatctttgttagtttgaaatctgttttgtcttaaattaggacaaacccctgctttttttctgttttctatttgcttggtatattttcctccatccctttattttgagcctatgagtgtcattacgcatgagatgggtctcttaaagacagcattaccattgggtcttgcttttttattcaacttgccactttgtcttttaagtggggcattttgcccatttacattcaaggtcagtattgatatgtatggatttgatcctgtcattgtgctattagccggttactatgttagcttgtttgtgtggttgctttacagtgacactggtctgtgtgtttaagtgtggttttgtattagctgatagcagtctttcctttctatatttagtgttcctttcaaggtctcttgtaaggcaggtctggtgggaatgaattccctcaacatttgcttatctgaaaaggatcttaagtctccttcacttaggaagcttagtttgtctggatatgaaattcttggttgaagatttttttctttaagaatgttgaatataggccccaaatctcttctggcttgtagggtttcagtggagaggtccgctgttagcctgatggggttcccttgtaggttacctgccctttctctctagctacctttaacattctttccttcatttcgaccttggaaaatctgatgattatgtatcttggggatgatcttcttgtgtagaatcttgcagttctctgtatttcctgaatttgactgtcagcttctttagcaagcttgggaaagttttcatggatgatgtcctgaaatgtgtttccaagttgtttgctttatcctcctccctttcagggatgccagtgattcgtagatttggcctttttacataatcccatacttctcagtggttttttttttcatttcttttttttcttttttctttatttttgtctgactgtcttatttcagagaaccagtcttcaagttctgagattcttttctcagcttggcttattctgctattaatacttgtgattaaattgtgaaattcttatattgtgttattcagctctgtcagacccattaggttcatttttataccagctatttcattcttcagttcctgcatcactttattgtgattcttattttccttggattgggttttgccatcctcctgaatctcaatgatctttgttcctgtccatattctgaattctgtgtctgtcattccagccagttcagcctggttaagaactcttgttggagaactggtgtggttgtttggaggacatatgacaatttggccatttgagtcacgagagttcttgtgttggtcctttctcatctctgcatgtgggtgctcctttaaccagttgtagattgagaacagtcaacagaattcttttctggatgttttcaccaggccaaggctttgtgcagggtctttatttgaagctgacttcttgtccctggtttcagagggaggtatgttagtgaggtatttttggtgttgaagctttggggtatgatccagcaggtggcacttaggcttattggtcggttggtagactcttgcttggttgtgtggctcccccatgttaactcacagttgcagccatgttctctctcaatgctctgaaagtgtgggtttctctcccccttgagtgctgtctgtagatcatgacttggcactcctcggatgcccactgcagctcttgtgtaatctcagtgtttatgttcctttcccaacttggaggcagcagaggaagggactttggtattggttgtggccaagggtcatttgcttgtcacctggggactccaccccagagagatgcaggtcagcagtggctcagtgcaagcagcccaggatggagagtctgtgctgtgggcccaagccaggggtttcctgtcttgtgtcaagcaatgcggggggtgtgtgggatgcacgggagacacactggcctcctctccttgggtcagctgcagcttgctggaggtgtaaaatcaccctttctaggtgtacagttctgtgaattttgacaaatgcatcagtcatgtaaccaccatcacaattaagttatataacatttataagcactttaaagcttttgatgcatgttaatcaaattacctgctggtaacattatatgtattcctatctaccatcagcttataaaatgtgaacattgggtattgtccttaaaagactaaaaaaaaaaaagtccagtttttaggtaaattttccatctcattttaagttactttttttaatattaatgaagttgcattttttttgtaggtttatctgtttttatgtcttacagtgtgaatttttgttatgtttttggcctgtatttctggccaattatctctttcttattgatttttaagaactattagggggctggggttgaaagagtgatctgtcatgtcgcaaatacattttcttttgtcattaagccacttttaatattatgtatagctttttttctctcaaaagttttaagttcctgtagtctcaccatcttttcctcatagagtccaccatggaagtcatcttcataaagtcctttcccactccatgattatttaaatgttttccctttttaaatttaattcatctggaatttatttttggtatatcacatggagtagaattttattttctcccccaaatgatgagccacttgtcctggtcccatttatcaaataatagatcttttccccaccaatttgaaaagccacctgtattatatatcatatttatatacttaagtatgtctctgaactttcccttctgttccacaaaattccttgtctttttgggagaagactacttactggttcgcactgtttttaataatgtagttttataaaatggtttaatatctggtttggcaagtactacttttcattattatactttttcaaaatgttctctcaggccctaattatttcagatgaactttaaaccatatctgagtttaaacacccaataagaatttgtattgaaattttatgtttatagattaatctaagaataatttatatcattataagcagtcttgtcactgagggatgttcaaaaactgactcattgctcttcagagattaaagttttataattttttaagagtataaaaattataaattataaaaattataaaagcataggttctacatgttttatgtgttcatcctaggaatcatgttattgttgttaccattgattttagcatctgtttttgcattttactttccaacttgtggatcctatttacagcattctatttattaatttttataaaaacctagtttattaaaaactacttacagtaatatttgattttttaaagacaattaggtcatttgtaaataataagttttccttcacttttctgattttattttatttatttatttatttatttatttagagacagagtctcactctgttgcctactttggagtgcagtggagtgatctcagctcactgcaacctctacctcccaggttcaagcaattctcttgcctcagcctcctgagtaactgggattacagacacatgccaccacacccagctaatttttttgtatttttagtagagacggggtttcatcatgttggccaggctggtcttgaactcctaacctcaagtgatccacccaccttggcctcccaaagtgctaggattacaggtgtgagccaccgcaccaggcccacttttctgatttcatacttcacttctttttctggtatttcattatttagaattatttttataatttcaaataattcttcacattgtcatattttaatgacatatgaagtaatatattttttaaatcaaaaatagatgttaatgcagtaccttatggtgaattaatccctcagctttagaataaaccttatttggctatggtgtattaatcttttaacattatgctcaatatttattatttgaaatatatatataatcactaactttagttttctttaatatactatctttgtcaagttatggtattaaggttggattattctcatgttgtaaaattgagactcttgcatttttctatgctttggaacaatttaaatggcataaccatacctgttgcttaataagcagacttagctcacctgtatcacctgctccaaagctttttgggggaccatgagccatagcattttttaaagccctctctctcactcagtgttcagaatttgtattaaaatttcaaagttcatttaacaattttgattatcagagtgaaaagctaatgcatctgttttcttagacttgaacagagtataaaataaagatgaaaactaaatctcaaacacatttccatcagtgctttggatttcattagttcttggcaaacattatttacacttacataaagtttattgattccagtatgatgttcaaaagctgactcattgctcttcagaaattacagaaatgtctaccctcaatctcttgggaaagaaactgaattaaaaaggtagagtaagaaataagctgaaacttgtctgtatcaattagttttccttgagcactccctggatatatgcaactacacggaagtatttaagagattataaaaacagtttctcatcaagtttttcatctgaggcagggaccttgatggtttcttctcatggacaggtaactctatgtacatttcagtacatccctgtaatcttcagcctacttgttagttaccataacaacagtaacagcattttcttcttctttatccaggacatctgtgttaaggcttatctagcccttcgtcatcacacaaacctactgatcatcctgttctccatgatgctgatgacaggaatgccccagttaacaagcaaagaagacattgaatatatccgggatgccctcacagtggggaaaaatgaggaggatgctaaaaagtattttcttgatcagatcgaagtttgcagagacaaaggatggactgtgcagtttaattggtttctacatcttgttcttggcatcaaacaaggagagaaacattcagcctaatactttaggctagaatcaaaaacaagttagtgttctatggtttaaattagcatagcaatcatcgaacttggatttcaaatgcaatagacattgtgaaagctggcatttcagaagtatagctcttttcctacctgaactcttccctggagaaaagatgttggcattgctgattgtttggttaagcaatgtccagtgctaggattatttgcaggtttggttttttctcatttgtctgtggcattggagaatattctcggtttaaacagactaatgacttccttattgtccctgatattttgactatcttactattgagtgcttctggaaattctttggaataattgatgacatctattttcatctgggtttagtctcaattttggttatctttgtgttcctcaagctctttaaagaaaaagatgtaatcgttgtaacctttgtctcattccttaaatgatgcttccaaacatctccttagtgtctgcaggtgttagtggtgtgctaaaagcaaggaaagcgagttagtcttttcagtgtcttttgcaattcaattcttttgtcatgtataactgagacacacaaacacagcaggagaaatctaaaccgttgtgccttgaccttcctctgctggtcttgttccagggttatgaatatgaaaaaatagagatgagactttttgtgtcaactctgtccacaagagtgagttatctagtatgattagtatagctttctccagcatggcagcaggaagtaactacagggcctcttttatgcctgacatttcttcccttcctttttccctgcctccctttttcatcaattgcgatgctcccacaactctttacagacttgtgaaatcttcaagaacacctttactctataactcaaaaattagttgaaaaataattacttctcaaggattattagaatcttaggtacttatttgtaaagatgtttagtgacttttttttcaagtatcttattaaaggaggcattctagaaaatatgaattagtttccaaatgccttaattttaaactttggcctgaacagttttttctttttcttaatggaagaagatatttaatatcttaaaaatattccaagttaggaagaacactacttgccttatccatttcccatttaaaggacttttaaactttgacacatccttcagatttcctgaaaataattgaaatatcttactttaaaaatattttcatctctgaaatatctcgttatttattggaggtattgtttaaccttagagagaccattaaattatttataaaatattttgtaattacctgtagctaatacattacatagaaaaaaactatgttaacagtgtctctgtttaagtataatcagatataaatatatacttaattttttaattttaaaaatagatacctgtttgactttgaggtagtccagaccttttctttttttttttttttttaatgtgtgcaaaagcccaaaggttcctaagcctggctgcaaagaagaatcaacagggacactttttaaaaacactcttatcagcctgggcaacacagtgagactccatctcttaaaaaaaaaattagctgggtatagtggtatgtgcctgtagtcccaggtactcaggaggctgaggcaggaggattgcctgagcccaggaggtggaaactgcagagagtcatgatcatgtccttacactccagcctggataacagagcgagaccctgtctcaaaaaaataaaataaaaaataaaaacacccttgcctgcgctccattcccaggttataatttaattactgtgggatgagacccagacatcaatatttttctagattcttcaggtgattctaattcacagccagagttggaagccctgcgtggcctttgaaggtctagatgattcttcttccttgccctttgagcttttccccatctcacaggtatctagaaaaaaactcctcttctttggcaacctgtccttttaaaatcacactctacccacctgtacagaagaccatgccctataatgaaatgtttattcctatctataaatggaggataaacattttgtggcacttctggaccaactattccctactattcttttgaagaaaggcaggaagagtactttctaattcagaagaggatgttttcactattctgataaacaatagccaagttcagaccttgtacagattctttttatttgaattgctgaaataatttattgatgatgaaaaaaagattagagaggaatacatttatatttagcttattggcacatgtgcatacatatttcctcttcaaatgaaccagttctttcatttcattatgctaatatatatatataacatatatatgctaatatatatataacatatatatgctaatatatatatatcacacatatatatcacagttttatatatatatatgtatgtgtgtgtgtatatatatatatatatatcacagttgggcttgattcttccgtattccaaagagcataatttcagttctatagacttatagataaataaaaatcatctttgtgggcttccttcctttactgttcgcagtgaattacatgacgaacaacttctatacctttgaaaatgttctagaactagaatcatcctgctactgggaactacccacagctctatcttcaatgccaggtgaaaacacagatcacaagtcagatgaatcaggccaaagcaacttttatgtatatctaggactggcgacataatttgcagagcccagtgaacagtgaaaatgcagtcccatcattcaaaaattattaagaaattcgagatggcaacagcagttgtcacaccaagcacagtgcccttctgagcatgaggctctgtgtgactgcatgggtccatgagaccagcactgtgtgggtctgaatgatggctttggtgttcagtttagcacacgcggtctaccacgtctgcatgagtggtaaatgtagtgcctgggtcaaaatgttccttctgttcaaatcgaaatacctcatctctatggctctatggctgtacattaggacctagaacagtggcccattgctcttagactggaaccatgtccactaaaataaacctaagcagatgttgtagacctagccccacaggactgcatttagctgcttcagtgacactttgatgaaagtatggagaagtggagacattatagataaaatatatcaattcccagagaaaactcttgacttaaaaacttaactgtagtaaatatatctttttcaggtgatgaattatttttttaaaaaaggttacatataggaattctgcagtataatttggaggctattagtgctatattaatggaaattaattattttttaagtaagtccaaaaaataatctagaaagtaagtttccagagcaaatctgacctagcatttggtatgctaggctctgcttttcatgattttgaaataaatcataattagacttaacaatatggagaaaataaacttgtatttttaagtgttctgttggcttattttctgtttcatccaactcaataattctgataaataaatttggttctagtttggtgcttgtctgcatagtctcaaagattcatttcaggacagctatctggggaacaaaaaacacacaccttggccaggcatggtggctcatgcctgtaatcccagcac

SEQ ID NO: 181 - DNA, 18995 bp, Human
tctctgtatgaccattatttagcatagcgcttggcacacaataggtgctcaggaaatacttgttgactgacactcagctgtcagtttcctcacctttaatatcagggtgttttcgtttggttggttggttgtttggttttgtttttgagacagggtctcactccattgcccaggctggagtgctgtggcactgtcttagctcactgcagcctctgcctcctgggctcaagtcatcctcctgcctcagcctcccaagtagctgggacctcaggcatgtaccacattgctcagctaatttttaaattttttgtagagacaaagtctcactatgttgctcagcctggtcttgagctcctgggctcaagtgatcctcccaaagtgctgggattacaggcataagccactgctccttgccctaatatcagggtgttaatgtctgtctcataaatattattgtgagggtggagtcagaatgggagcaagccacagtaggtggacaataaatgctattattattatatggtcagagccaactgaggactgaggcctctccgaagtggcgacttgaggactgtttagagttggataggtttcatggaatagggagggcgttccgggagggaacagcctgagcaaaggcatggaggacagaactgtaaaggcagtaaggaaacctctgtggctggatgaagagtatggcttgggataaccctgtggttagaaaggcagactggggccagatcagggagagccttgaatgtcaacccaacacatttaaacttaatccttaggcagtagggagccaatgaatgtttttgaacaaaggtggcaaccgaagaaatagtattttagaaagttccatttgatatggatttactgtaattagccaggatcgtgccactgcactccagcctgggtgacaagagcaaaattctgtctaaaacaaaacaaaacaataccacaaaagcatgtcccctatcagtgaaaaaagaaaaagagttaagggtatacctccaatacagacatattcttttttttttttttttttctgagatgtagtcttgctctttttggccaggctggagtgcattggcaagatctcggctcactgcaacctccgcctcccaggttcaagtgcttctcctgcctcagcctccccagtagctgggactacaggtgcccaccacgatgcccagctaattttttatttatttatttatttattttgagacggagtctcactctgttgcccaggcaggagtgcagtggcatgatttccgctcactgcaagctccgcctcccaggtacacgccattctcctgcctcagcctcctgagtagctgggactacaggtgcctgccgccatgcccggctaatttttgcatttttagtagagatgaggtttcaccatgttagccaggatagtctcgatctcctgaccttgtgatccgtctgcctcggcctcccaaagtgctgggattacaggggtgagccaccgcacccggctaatttttgaatttttagtagagactgggtttcactgtgccggccaggctggcctcgaactcctgacctcaaatgatccacctgtctcagcctcccaaagtgctgggattacaggtgtaaaccaccgcacctggctctagttcttattttttgtgagaaataaagataaatacaggatccagtctaatgttttcttccacatcccattgacaaatgactaatcggcccctctcaccccaagcttctgggggcttctcggggcaggtggagctggtggccatcctgcaggctgctggggatctgagaagaactggagttgagattcttcccccagtggcctgggcctagcaggggagggtcgtgggctgtagcacctcccacagcgcggccaggcctccactccttgagcagggggaaggggggtgaagttgagccgagattagcaggagtcgggagggaggctcctagacctgcagagaaaggggtgcgataggcaaaggcaccatgcctctgcgggatgaaaccctccgagaggtgtgggcctctgacaggtctggaaggcccccagttcgtggcacctgaaccctggggggcctagatggagggatggggagtgggtgggatggggagggaaggggaagggagacaggctgatccctttgctaccctcagtgggcatgaagaagaaagcctgagcccggaggccccgcggcgccccaaacaggtatgccaccccacttggaaaggaagcagaaagatgtccccgctgtgcgtaaacccacgcagggtagggggtctaggggtgggacaggtcccccttagcagggtctgggggttgcatgtctggagatctggggggagaaagggctgtttgggggcttggggtttccagggaaggaatagggactttggagcattggatatggccacgatgcatggaaggggtcatcctgcctcactccaagaagggggctgcagttccccccggataatctgcggttatttctggcggctcaagggattagagggggatgggcgggcctcagcgcccccctttccttcctcgacctcctcttgacccccgttccgcagcgacccgccccggcacagaggctaaggaagaagaggacggaggcccccgaatccccctgccccacgggatccaagccccggaagcccggaggtgggcggggtgcagagcccgggtggacccccagggtgtgggctgcggaagggaggggcttgagggccggcgcgggtgtccccgagccctggaacggggtgggggaggagggggcggggagtgatgagaggggagggattggggttggggttggggttggggttggtgtagaagggggtggcgttggggtagaagggggtgggaagctgaatggaagccggggagaagtgttgaaagtggaaacccaagcccaggggagatccctagggtgaggagcccgagggggtgcgcccaggcttgggggtagcgggtagaggcgctgcctcgcggacccgcggatgggaccctgtctgaaccccgcatctcggctcagctgggcggagggggaggccgcgggaggagccttccccagacccagcccaggcccgggcgccgcagacggtctacgccaggttcctcagggaccccgaggccaagaagcgcgacccccgggaaacctttctggtagcccgtgccccagacgcggaggacggtgagagagggccccagggacgcgggtgagggggcggtggagctaaggagagaaggggctggctggacgggaacggcccagagaggcagaaaacaactgtagtcaaatagcccccacttttctggccttatctttgagccaggtattgtgctaagcaccaactatgagagggtgctttgttccccccctccaccattgtacagatggagaaactgagtcatagagccgttaagggtttttgccttaaccagcagttaggagccagaagtagcccagatgggtctgactcaaggtcagaaacagacaaggtcagggagaagcacagtggatgcagggagatggggaaaggaggcaaggcgagcgtgtaaggagaggagggtctcaggaggagagagggagggcatttccccaggacaggattcctccaaccccagccactcccctgatttgcagaccctgaaggctgccagtcaccctcattcttctgggaaggtgccaggtctccggttcttgtttcagaagggcaggctccccttctggtgcccatgcaccacttcccagcagtctggaggaactgggctccccagataaggagggcccggctcaaacccccattatgaagagtttctacctgcagaggaggaggaggaagaggaggacgaggaggacgaggaagaggaggcagaggaaaagaaagagaaaatccttctgcctcccaagaagcccctgagagagaagagctccgcagacctgaaggagaggagggccaaggcccagggcccaaggggtgggtgctgagggtgctgagagagttcacagggaagcagaacagccctgtccttggagggcttggcgtctcactgagacacagcgattgaggcctcaaaatgaacccagtgctgtgaccggagggtttttcctctgataatttctccccacgatggtccttaaggacacagaccaatatatgcctccacccctggccccactgcccctgccccttgagctctgtgaggcagaggaggacagaggattctagttttctttgtgatttttgtttagtttttgttttaactcagtggaaattgttatcatttttataaaagtatcaaagtgattacagtaaaaagaaatcaatgaatcaatgctgtgatggtgtcctggcctgggcacattacctgttagggaccagcagcctggcctagagctaggaccttgggcctctgaagcagagatagcacactctgtagtggtgaccagagaaggtttcctggaggacatgggacaaaaggcaggattcagaggctcggttagaaggcctggtgttcattcattcgggaactgcttgttaagctcctggtctttgtccagagcttttttggcctcagggaaagaaaaaccaaaatgagcagaagtcaatacaaaaattagccaggggtggtggcgcgcgcctgtaatcccagctacttgggcggctgaggcacaagaatcacttgaaccctggaggtggaggttgcagtgagccgagatcctgccactgcattccagcctgggcaacagtgagactgtctcaaaaaaaaaaagaaaaagaaggcaggctgtgggcccctgtcaagctttcagcctccctggggactataggcaggacaagagggttggaaggcagccttcagccccagtagacaccttctttgcctgacccccatcttccatttccaggagacctgggaagccctgaccccccaccgaaacctctgcgtgttaggaataaggaagctccagcaggggaggggaccaagatgagaaagaccaagaagaaaggtgagcccagcctagggaggaacaggggactccagttgcggtgggggttgtgacgctttcacatccacacatgcagggtctggggaggccgacaaggacccctcagggagcccagccagtgcgaggaagagcccagcagccatgtttctggttggggaaggcagtcctgacaagaaagccctgaagaagaaaggtggatggcaagggcttctggtgtggtgacatcttgaggtggtcctgggggcggggagctagagggtccttacagcatacaagacagtgctaggtaaggagtttgccgggtctagagtcagacaacgtgcagggcatcttgacccccgctttgatagctatgcggtctcaggcaggtgtcttagcctttttgggctctaataataacatggggtcgactctcttgtggttgtggggagcatccaagtgagacatgggtattggaagcactttgcaaaccagggtgaggagttcacagccttgtttccccctccacgctcaggcactcccaaaggcgcgaggaaggaggaagaagaggaggaggaggcagctacggtgataaagaacagcaatcaaaagggcaaagccaaaggaaaaggcaaaaaggttggggcccagaggggcagggggctgaggtcccttcagggagcagaggcaggggcctggacttgggagcctagagggtgggggcttggagccacttgaggttagaaccttggctccccctcttgtgacaggatataaggacaaaggaaaccagatttgtgcaaacagaggaggcgtttgtggggtcaccaggctaggactggccatgcaagggccttatgtcatctgggctctctgaggcctcccctctggagcataaccatcagacagccagagatgtccccacgcccccaccatgttttctgtgccagggaggaggagcacacaggcagagaggcagatgagtactgactgacagtcagctgcaccggttgttaaaatgtttccaccctacagccctgagctccccaggcgctttcactcaccttacccaggacctcccaacctcccagcaactaaacactccagcaacgaaagggttaatactgcccatcaggagcctccctgtttctcctccaagcttaccagtatgcatctccatggcgaacaggttgttaaatattttgaatattgcccctgctcccaaacaggactcagacaccaacacacaaaagctggagtaagcaggagagggaggtccaactgacagaaagtaacaaaagtcttcaaggaacaggtttctcccagtgggaagatcaccacgaggacagggcctggattttagctttgtaggtttattagtttgtgcaggagtggtcaggtctagggggactgattcacattaaccaagatcaccagatgctgatgtacaaactgaaaggccagtttactgtctcccagaggggaatgtaactgcagaacagccttcagtacagtaggctcttgaaatttgcagctgctgaagtgtttgaataagttctggctttctccacatcgtgttccaaacatagtcttttgtttcccaggtttcttctggaacaacctagagtagagaacaggtgatcacttgtccctgagctgagggttcactgctctacatcagcctccctcaaacacactgcaaacctgtgctcaacaaaaacagccatggccaggcaaagtggctcatgcctgtaatcccagcactttgggaggaggaggcagatgggtcacttgaagtcaggagttcaaaccagcctggcgaatagtagagatggtgaaaccccatctctactaaaaatacaaaaattatcggggcatggtgatgcgcacctgtagtcccagctacttaggaggatgaggcaggagaatcacttgaacccaggaggtggaggctgcagcgagctgagatcacgccactgcattccagcctgggcaacaagagcgaggctccatctcaaaaaaataaaaaataaattttaaaaaatggccaaccacagcacatctttgtggattcttcgtggctcccaaatagcattgaaccctcaaatgcacacacccaggctggcagtccatgcttgcctctgttggaaaagttgggcttagactcttggctcccttcctgtgagggatagaacatgaggacaaagggcaccaggtttgtgagaacagaaggggctgttgtggggtcaccaggccaccctagggctttatgtcaccaaattgttcttaggagtttctcaatgagcaaagtgagcttacatattcattcatgtgttaactatgcattgctatgtaacaaatcaccccaaactgagcatcttaaaacaacatttactttcttattcaatttctgagagccagaaatctaggagtggcttagcagagtagttctggctcagggtctcggaggaagctgcagtcaaaatgtcagctggggcttcggtcactctgaaggcttcactggaaatgaaggatccacttctaaaatagttccctgtggtaggtgttagctggagatctcagttccttcctacagggacctctcctggaggctgcttgagtgttcttttttttttttttttttgcttgagtgttcttatggcatggcagccaacttctcccaaagtccaagagacagagagccatatagaagccacaatatcttttatgacctaaccttggagtggcccatgatcacttctgccatattctactggtcacagggaccaaccctggtatgcagtgggaggagactacacaaaggcacaaataccaggagacaaggatcactgggtgccatcttatgataatgaatatcatcttgactatggtattcattatttactatacgctaacaataagagtagcagctaacacttccatagtgcttagaacacagcagtccattctgttagccccacttcactgcctgagacagtgtgcaaaggagggaaggtctttctaaaggctctggacctcataggagattggacaaaactcatgccccagccccacctcttactagttatgtgaacttgggcaagtgacttaacttctctaagcctcagtttcttcatctatacaatggggatgactaccgcagtggggtgataagaggatgaaatgagtaaatatttcgaaagtacttgaaactatggcaccctgatagaatttatgcaagcgtgtgttaaatacataggtaaggtctgtcccaggtatccacccctactatacctacttctcagatgagaaaattgagttacagtgtggtgaaacttaacagtgaagacagttagtagtgaaactaggatttgaacctagacagtctggctccagagtgtgtgctcctatccacaagctaagcagaatcaaaataaatcacagagctccccagagcctcctaacttggccgtgccgggctgccagggagcatgaggggcagtggcttccccgcctccagggatgcggcccctgctctagccagcctctctgttctctccgcacacagaaagcggtgagttgtcctgccgggctgcccgtgtctcagcactgggacctgctgggagcgggggagctggtgctctggggctgatgtaccctctgcccccacccagaaggaggagagggccccgtctccccccgtggaggtggacgaaccccgggagtttgtgctccggcctgccccccagggccgcacggtgcgctgccggctgacccgggacaaaaagggcatggatcgaggcatgtatccctcctacttcctgcacctggacacggagaagaaggtgggtggggagaggcagcagaggagggagtgtggagggatccggcatgggggccacgggacaaacgggcctgatttctccctgcagctcacctccaccccttcccaccttctcttcccatcctctcacctgtctccccttttccccaggtgttcctcttggctggcaggaaacgaaaacggagcaagacagccaattacctcatctccatcgaccctaccaatctgtcccgaggaggggagaatttcatcgggaagctgaggtggggctgggcttcctggggctggggggacttgggtcagcaaaaggccatagcccgtcatctctgtcctgctgtgcctggtagagcacccaccacagtgggcaccctggaaacgtcccctagcctagggcctctcgctttgatgtacatagatcatgtggggagcttgttaaaatggttgagtgtgtggggtgggcccgggagtctacatttttaatgagcacccaggcgatgcccacactgctgccagcccagggcctcacttggagcagggcataagttccacgagggcaggcactgtgcctgccttgtttagggctgaattcctagcactgaacacatattagctactcaacaagtatttactgatcaagtgaatgaacatatattcagcactatcctgtgctgtcttcccatacatctcatctaatcctcaccacaaatctgagagctgaaggaaggggatgcctgagtcaggccttatttcttaaatgtatgtatttaggctgggcacagtggctaatgcctgtaatcccagcattttgggaggccaaggcgggtggatcacctgaggtcaggagtccgagatcagcctggccaacatggtgaaaccccgtctctattaaaaatacaaaaattagccaggtgtggtggcatgcacctggagtcccagctacctgggaggctgaggtgggagaatctcttgaacccaagacggggaggttgcagtgagctgggatcatgccactgcacttccagcctgggtgacagaccaagaccctgcctcaaaaataaatgaataaataaatgtatgtatttaacaaaacttttataaggcctatttatgtgtcaggtgtgattctaagtcacttccaggccaggcgcgatggctcacacctgtaatcccagcactttgggaggctgaggcgggcggatcacaaggtcaggagatcaagaccaccctggctaacacagcgaaaccccgtctctactaaaaatacaaaaaaaaaaaaattagcccagcgtgctggcaggccctgtagtcccagctactcaggaggctgaggcagaagaatggcgtgaacccgggaggcggagcttgcagtgagcagagatcatgccactgcactccagcctgggcgacagagtgagactcagtctgaaaaaaataaagaaaaaaaaagtcacttccaaatgttaacccattcaatcctcttattgtccaaatgagggaaatgctgttgctcagcccattttatagatggggaagttggggctcagagagtttaaataccttgcctaagatctcacagctagtaatagtaagagatggagttgggattttaacactgcctagtctccttgtagattcagcccttttttttgttttgttttggagactgggtcttactctgtcgcccaggctggagtgcagtgatgtgatcaaggccatggctcactgcagcctcgacctcccaggctcaagtgatcctcccaccttagcctcctgagtagctgggactacaggcacatgccaccgtgcctagataatttggcaggtggggggcagagggcgggtgttttttgtagagacagcgttgtctgccatgttgcccaggctggtttccaactcctggactcaagcgatcctccctcctctgactcccaaagtgctgggattacaagcttgagccaccatgccctgggttgggccagcatttaaaaagacctctgcatagggggaagcctggggcaggggacatgaattgctcagtcctaactcacccccacccttgtaggaagctctctaaactgcttggctgtgtggaaggggcctggggcagggatgtaggatcccctcagccccaccccaagctctaccctgcttgcaggtccaacctcctggggaaccgcttcacggtctttgacaacgggcagaacccacagcgtgggtacagcactaatgtggcaagccttcggcaggagctggcagctgtgatctatgtgaggactccacctgtcccccatgccaggctgctccccttacaggggctggcctcacaggcatctgtttccttcccaggaaaccaacgtgctgggcttccgtggcccccggcgcatgaccgtcatcattcctggcatgagtgcggagaacgagagggtccccatccggccccgaaatgtgagccccgcacctccctggcccctggctccctatgtgagaaacaggagtcggggctcagcttaggaaatagccaactccctgagcacatccatcaccctccaacacaaattcattctggccacctagggaatggacttgggctttttgtaattgaattcactgaaaaaccacaatgggctttttggttgtttttggagtttacatcaaattcatatattacatccattcatatcttcattgaccacacatattgagtgccaagtattatcctaggcacctggaagacatcagtggacaaaacaaagatctgcacccctgggccaggcgcggtggctcacgcctgtaatcccagcactttgggaggccgagatgggcggatcacgaggtcaggagatcgagactatcctggctaacatggtgaaaccccgtctctactaaaaatacaaaaaaattagccgggcatggtggcgggcgcctatagtcccagctacttgggaggctgaggcaggagaatggcgtgaacctgggaggcggagcttgcagtaagccgagatggtgccactgcactccagcctgggcgacagagcaagactccatctcataaaaaacaaaacaaaacaaaacaaaaaaaccaaagctctgcccccctgaagctggcattctagtgggaggagagtgacagtagacaataatcgtgataaataagtaaattatggagcatactggaaggtggtaagtgctatggtgaaaaatgtcagaccaggtgcagtggctcacacctgtatccccagcactttgggaggacaaggtgggcggatcacttgaggtcaggagttcgagaccagcctggccaacatggctaaaccccgtctctactaaatatacaaaaattagccgggcgtggcagtgggcaactgtaatctcacctgtttactcaggaggctgacgcagggagtattgcttgaacccgggaagcagaggttgcagtgaggcaagatcacgccactgcactccagcctgggcaacagagcgacactctgtctcaaaaattaaaaaaaaaatgttgccagccatggtggctcacgcttgtgaccccagcattttgggaggccaagctgggcagatcacgaggtcaggagtttgagaccagcctggccaacgtggtaaaatcccgtctctactaaaaatacaaaaattaactgggcatggtgacaggcgcctgtaatcccagctactcaggagactgaggcaagagaatcacttgaaccccggaggcggaggttgcagtgagccaagatcacgctgctgcactccagcctgggtgacagagctagactccatctcaaaataaataaataaataaataataaaaaataaaaagaaaaaatttaaaaagaaaaaagtcaaacaggggaaggtagataataagtgtgtaagtctcaatattaaatatggttgtcaaagcagacctcaatgagaaggtgagggagtgagcctacagatatctgggggaagagcacctgggcagtgggaagagccagtgcaaaggtcctgtggcaggaggggccctggtggactggaggaaccaccaggtgaccagtgtggctggggggagaggaggtcagagaagtgaggggtagacagggtctttaaaactgatttttgctctgagagaaatgggaagctacagcagggttttgagcaaaggagtgacatgacttgtttttgtttttgtttttgttttgagacggagtctcgctctgtaacccaggctggagtgcaatggcctgatcgcaactcactgcaacctctacttcccaggttcaagagattctcctgcctcagcctcccgagtagctgggattacaggtgcataccaccatgctcagctaatttttgtattttcagtagagacgcggttttgccatgatggccaggttggtcttgaactcctgacctcaagtgacccacctgcctcagcctcccaaagtgctaggattacaggcctgagccactgtgcccagccttttttttttttttttttttttctgagaccgagtctcactctgggtctcactccagcccaggctagagtacagtggtatgatcatgacttactgcagcctcgacctcctggcttcaaacagtgctgcttcctgcctcagcctctcatgtagctgagaccctaggcacatgccaccatacctggctagttttttgtagagccagggtctcactttgttgcccaggctggtcttaaattcctgaagtgatcctctcgtctcggcttctcaaagtgttgggattatatgcgtgagccactgtgcttggcatgacttgtattttaaaaagcaaaagttgttttgcgtgtgtgtgtgtgtgagtttaagatggagagatgttctggagagacgtgtcagtcccgtgctctgctctttagcactgcaggtccagtgagtccaggatttaagagactctgggtgactcgcatgccccatcctcacaggagactgatgtcattttactcatttacaatgaaagataataccccgtcagctgatcacacatccttccctgctggaaagtcacggcccaggctgatctgcagggcaccagtcatgggaggctcagtcttgagggttcactcagcctgtgggccccacagttgtccttcctatgcctggaataaacacacaaatcccccagaggcagcatctcctgcccttgtttgggcccagtaagaaatgcctggtgctgtttcgggtctctcttttgccaattacagtgcagtgggaggaatggtaagagcaaggtgtcatggaaactcagagctgagacatctaaatcagatggggggtcaggaaggcttcttggaggtgatcttgagtggactcactctaatccatgaacgtgagcaggcgacaaggaaactcaagaaagaaagatcttaagggcacattatacagaccctgctccttcctttcagaaactctcctccaagtacactttctcttaactgcaatttacctatccatctccccagctcaactgtgtgccctttgcaggtccaagattggctcatcctgtcattaggtactggtgtgtgtctgtctcctaagaccacctgggtaccaatggcatggagcgcctatgtgccagatgccccttgccattttccagccctccgctttgacatcccagagacaaagccccattctcacagatgtgaaccctgtccacaaggatgccacagatgccaagcctattctcagataccctaatggatgaagatgtccaggccacacccctgtgcacacatgcccaggccccttctccggtcagtcctgagccatctcagccatctctaactgtcctctccctgtctactcccctggggcaccccaggctagtgacggcctgctggtgcgctggcagaacaagacgctggagagcctcatagaactgcacaacaagccacctgtctggaacgatgacagtggctcctacaccctcaacttccaaggccgggtcacccaggcctcagtcaagaacttccagattgtccacgctgatgaccgtgagtacctgagggcccaggtctggctcttctccaccacccccaggatgctgaccttcattcaagctcccctcaccccctcacacacacacacaccagcctttatcccgagagctgggacatcccacagggtcactctctcctccataggcactgacactgtgctctcaggagcctcagatattctaagcaggtgtcttggggctcatcacttcaggttcccattccagcattggccagagcagtgggttagatactgggacattctggataagattgtgttgaagggagggttggctcctagagtctgaaaaccacggacagcccaactcctctttgttcaaagagagtgctgaggctcagagagggcagccctttgcccagagtctctcagcaacttcaggaagttacactggccctcgaaatttatttcacaaaacttacacagtgtttactatgtgccaggcactgttctcaggattttacagataactgaatcattaaatcccttcaacgtccctgtgaagagtgccattattatccctatttggcaggaaactaaggcacagagaggttaagcaacttgcccacggtcacatcactagtaggaggtagagctgacagtctggatctccagtggccatgctcttaatctcttcaagatggttgccttttaggggcagggaatattaagcatttttgagtgcctactctgtgtcttctctcaagtgaggtcaaaggactaccctggaagactcagggaaacaaggtgtccctgttacaagccttggttggaaaggcttccttcccactagggtgaggaagtttggggatggaagggtatctcccataagtctctgggttcacagggttggaccaacattgagcgagccccaactgcatcctagggatgtgcccccagtgccacctgtcctgtggctgtgggactgctctccagatcacgtttctggtggagcctcgtccacctgagtttgggggtatttttagcaacttcctgtccctatggatcctgggggaggtgctgaggttggggctgggaacctggatcattgaagggagaggtgcccagtgaggctgaggaagggaaccaggggctagtcaaggggtggagctggggtctaaggtgggacttcgtggctggggataggaggaaagactgtggccagaaacaacagagaatttgggaaggaagaatgctgggcttggataaatttgacagggtcctatagttaatcaggtgcgggctctaggcatggcctgtggcagcagcagaaaggcaaggtccctgcccccaggagattatagtgtgactgcaaagccacgtggtgctggtgtggagtgagatagaagaagggatgggtgttgagtaactgagatggtggctgagggttggagccccaaggcaagggacagactgcccccaaggttgagggcactgtctgccaggatgggggtccaaggaggtctcgggccgcccccaccccgtcttgtgtccatagccgactatatcgtgctgcagttcggccgcgtggcggaggacgccttcaccctagactaccggtacccgctgtgcgccctgcaggccttcgccatcgccctctccagtttcgacgggaagctggcctgcgagtgaccccagcagcccctcagcgcccccagagcccgtcagcgtgggggaaaggattcagtggaggctggcagggtccctccagcaaagctcccgcggaaaactgctcctgtgtcggggctgacctctcactgcctctcggtgacctccgtcctctccccagcctggcacaggccgaggcaggaggagcccggacggcgggtaggacggagatgaagaacatctggagttggagccgcacatctggtctcggagctcgcctgcgccgctgtgcccccctcctccccgcgccccagtcacttcctgtccgggagcagtagtcattgttgttttaacctcccctctccccgggaccgcgctagggctccgaggagctggggcgggctaggaggagggggtaggtgatgggggacgagggccaggcacccacatccccaataaagccgcgtccttggccaagcggagcggtggttcctcagcgcgtgcggagaacgaggcggcaggaggcgtccgaggcgcgagctggaagtctcaacccccgtcccactcctgcccaggccccgggcgctcccgcgtcccctccccgcgcccgtcgcgggtcctaccgaaactcggcggccgcacagcgtcgagacgccccccgtgggggcccggggagccggggcgaaagggagggtcccggaggtcggggaagagggagaaagggagaagaaattcgagaaactagccacgcggggagaaccagacaaaccgggtcccggcagggcgggcgcagccgccagggcggagccgggtctggggccccgggagtggggggcaggcccgcgagctggagggtacgctccgccttggcggctcgggactagggtggaggggccgggagccccggggcccgtgcgctccggctctgccgggctcctcgtgacgcggcacccacggcccccggcaccgacgggagccctgcccgcgaggcgagggctccgccctcggccccgccccaggccggagccccaaattccggcgggtgcccgggagcggggcgaggcccggagcgcagggggaggaaggcagctccgcacgggcgggcgaggagcggggcgcccaggcgcgcgccagccggggtggccgggtcgcgaggccgcggggtaggcggcccgagcgcggctggacggccccgcccctcccggccagcaccgccccctgcgcgccccgccccctccttcccgcagcccccacccccgccccggctcctcaacacaaactttccgtcccgctcgctccctcctccgcgctcggcgcctcccgctccagcccggctcattccgcacattccggccagccccctccccacgaccccccttccccggccccccttgcggctccctcgggcccggcggagcggcccggccggagcgcccccgcgagctcggaccaggtaagccgggcggacgccgggaggaggccccgctcgggagaggtggtttggttggtcggctgggctggctggggggagcgacactcgagggggactgggtccccgagctattgtccagccggagctggagccccggatcggggtgccgggaagtttagagggaagggggaaaatctctccgggaagccccgccccccgccctccccacccccccgcgacggggacgagttggtccgggaaggtggggaagccggggagaccgtgtcccctgtgccgtcgcctgtcccgccgtccgtgcttggggggtcggggcggggatccgggggccgcacagtgtggagggcctgcctgccaccctggagctcatatccggggcgcccagtcccgggccccgccgccctttggactcccggcccgcgcgctcccggagcccgcccggcctcagctccacgcaggcctcgggcccggcctcccagcgcccaggccggtttctgcgcgcggtgccgcggctgcgctgggttgtggagggtgtctgggaccaaagccgcgcgccccggccgtgtgtcccctgagaggcagggaggggctcacgttcccttcagttctgccgcctgcgtcggggtgctgattcagagttccagccctgagcgctgtgagcttggctcggaggggtctggatttggggccttttcttccccacacttgctcagggcccttgtttagacttgacaaggtttgagggtggctggtctcccgcttcctaccccggtccccaccattgtctgtcatgccctttattcctgctaggggagggagggctgggagcgctggtctggatctgttttccagcccagctgggccctggggcagtgtcattgagaccccgctctgtcaactttcctggtgaggggccctgatccagggctgagagattctttcagtgcgagggggaaggaggccttggggcggacttctcaggggctgtcttcttctgtgtcttccctctttccaggtaggggcag

SEQ ID NO: 182 - DNA, 68812 bp, Human
  misc_feature (1)...(68812): n = A,T,C or G
tcggtcactgtgagtgccgcctcgcttccatttccaaatatctgctattaatagccttgctgtagtgggcacgtgtgcccacatcaccaagctgtcagaggaaaagaagggagggctttcaattcaacatgtgtactcaaattatagattaaccaggtttagatgaggctgcatgacgaccgggaacaggaaggggagaggagaaacgagaggctcccaggcttgggtggggaggagcccctctgcagatgcccaatccccctaatttacgtatcgcacacccctgaatggcgcctatggttctttttctccttcatcatcatcatcttctttttctttttttactacgctttgcaacctaccttggtaccctcaacccttctacccccaccttccctctgcagtgcaaggcttgaaaaacaggccatcccaccaatcagcaggcctccccgggaaactcgctccgcccctcagccgcattgggccgaggcgcgctcccccgcggcccgccgggtcccagccactgagcatgcccagcgcctcgactgctgagtgcccagccagcatcctgcagtgcctgggagcctgaggccgaggagggtcccggcgtagtaaaggggcggcaaccccaaacgggccaggcatcaaaatgagacagcattaaaccgagtgacatctctgtgggtccttagtgccaggcgagcaagcagggacaaactgcttgtttataggtcggcttaaaaaataaaaaaactctggggagcgtttgtttgtggggagactgataccgcaaggtgaccctgaaaggggcgcttcaagtagacccaggctgctgatctggtccactcatgaagtaaccattttcctgtacagttgagctggcaccatccttgttttctccctgttatccttgtggtcaaggttaaaaacttatagggtggttcaatgggtgtgggagctgtgtgtgaaacaaacatttcagccaatatttgcacagtagggttttggccttatgaaccctctgaaggtccctaacagctttttaaagtcacggatagacttcggaatatgataagggacctctcatttcccctcccccatgccctcagccttaggtgtgagtccccccgtcacacggatgggcaaggggagcaggagaaaaggtgatatttacattttctccctacttgatcagcaactaattccacagcgccggacgtgagacacttcctggggatccctgttctccttttgtagtgaccataactgcccccagtcactgcccttgggcgtccctctgttccttccaggtacctcacggcagcaaatctggggatcccaaggtggaaggctggcccagaagtcctttagaaaaaccttaaaaaatacagatcccctcaccatggcctatcgccctgaagccgaaatctagcttttaaatttcctgggggaaacagccttgactagaaacctccctcccgtgggtcagtcttacctgataggtaagaggcagcccagctccggcgcccccgcctccccccggcctcccactcggggctctgtagccgcagtgcccccccgtggccccccaccctcactcctgcgtcttcccgagctcgccccctcccgttttcccagnnnnnnnnnnnnnnnnnnnnnnnnnnnnnnnnnnnnnnnnnnnnnnnnnnnnnnnnnnnnnnnnnnnnnnnnnnnnnnnnnnnnnnnnnnnnnnnnnnnnnnnnnnnnnnnnnnnnnnnnnnnnnnnnnnnnnnnnnnnnnnnnnnnnnnnnnnnnnnnncggagttgtcggtgtccaggcgcgttgtccttatcgctcgccgtggtgctccgcctcttctccagtacgcttggtggccgagagggccgggcgcgcgtcgctcggcccggaatgtagagacccgggcgggacgtcccggcgccgctgcccggctgccgagcgcggaggctccgtcacgtgtttttctcctccgagtgagacagggcggcgcggtcggagggggccggcgcgcagagccagacgccgccgcttgttttggttggggctctcggcaactctccgaggaggaggaggaggagggaggaggggagaagtaactgcagcgcagcgcctcccgaggaacaggcgtcttccccgaacccttcccaaacctcccccatcccctctcgcccttgtcccctcccctcctccccagccgcctggagcgaggggcagggatgagtctgtccctccggccggtccccagctgcagtggctgcccggtatcgtttcgcatggaaaagccactttctccacccgccgagatgggcccggatgggggctgcagaggacgcgcccgcgggcggcggcagcagcagcagcagcagcagcagcaacagcaacagccgcagcgccgcggtctctgcgactgagctggtatttgggcggctggtggcggctgggacggttggggggtgggagcggataacggaggagggagaaccccgtgcaacgttgggacttggcaacccgcctccccctgcccaaggatatttaatttgcctcgggaatcgctgcttccagaggggaactcaggagggaaggcgcgcgcgcgcgcgcgctcctggaggggcaccgcagggacccccgactgtcgcctccctgtgccggactccagccggggcgacgagagatgcatcttcgctccttcctggtggcggcggcggctgagaggagacttggctctcggaggatcggggctgccctcaccccggacgcactgcctccccgccgggcgtgaagcgcccgaaaactccggtcgggctctctcctgggctcagcagctgcgtcctccttcagctgcccctccccggcgcggggggcggcgtggatttcagagtcggggtttctgctgcctccagccctgtttgcatgtgccgggccgcggcgaggagcctccgccccccacccggttgtttttcggagcctccctctgctcagcgttggtggtggcggtggcagcatggcgagccctccggagagcgatggcttctcggacgtgcgcaaggtgggctacctgcgcaaacccaagagcatgcacaaacgcttcttcgtactgcgcgcggccagcgaggctgggggcccggcgcgcctcgagtactacgagaacgagaagaagtggcggcacaagtcgagcgcccccaaacgctcgatcccccttgagagctgcttcaacatcaacaagcgggctgactccaagaacaagcacctggtggctctctacacccgggacgagcactttgccatcgcggcggacagcgaggccgagcaagacagctggtaccaggctctcctacagctgcacaaccgtgctaagggccaccacgacggagctgcggccctcggggcgggaggtggtgggggcagctgcagcggcagctccggccttggtgaggctggggaggacttgagctacggtgacgtgcccccaggacccgcattcaaagaggtctggcaagtgatcctgaagcccaagggcctgggtcagacaaagaacctgattggtatctaccgcctttgcctgaccagcaagaccatcagcttcgtgaagctgaactcggaggcagcggccgtggtgctgcagctgatgaacatcaggcgctgtggccactcggaaaacttcttcttcatcgaggtgggccgttctgccgtgacggggcccggggagttctggatgcaggtggatgactctgtggtggcccagaacatgcacgagaccatcctggaggccatgcgggccatgagtgatgagttccgccctcgcagcaagagccagtcctcgtccaactgctctaaccccatcagcgtccccctgcgccggcaccatctcaacaatcccccgcccagccaggtggggctgacccgccgatcacgcactgagagcatcaccgccacctccccggccagcatggtgggcgggaagccaggctccttccgtgtccgcgcctccagtgacggcgaaggcaccatgtcccgcccagcctcggtggacggcagccctgtgagtcccagcaccaacagaacccacgcccaccggcatcggggcagcgcccggctgcaccccccgctcaaccacagccgctccatccccatgccggcttcccgctgctcgccttcggccaccagcccggtcagtctgtcgtccagtagcaccagtggccatggctccacctcggattgtctcttcccacggcgatctagtgcttcggtgtctggttcccccagcgatggcggtttcatctcctcggatgagtatggctccagtccctgcgatttccggagttccttccgcagtgtcactccggattccctgggccacaccccaccagcccgcggtgaggaggagctaagcaactatatctgcatgggtggcaaggggccctccaccctgaccgcccccaacggtcactacattttgtctcggggtggcaatggccaccgctgcaccccaggaacaggcttgggcacgagtccagccttggctggggatgaagcagccagtgctgcagatctggataatcggttccgaaagagaactcactcggcaggcacatcccctaccattacccaccagaagaccccgtcccagtcctcagtggcttccattgaggagtacacagagatgatgcctgcctacccaccaggaggtggcagtggaggccgactgccgggacacaggcactccgccttcgtgcccacccgctcctacccagaggagggtctggaaatgcaccccttggagcgtcggggggggcaccaccgcccagacagctccaccctccacacggatgatggctacatgcccatgtccccaggggtggccccagtgcccagtggccgaaagggcagtggagactatatgcccatgagccccaagagcgtatctgccccacagcagatcatcaatcccatcagacgccatccccagagagtggaccccaatggctacatgatgatgtcccccagcggtggctgctctcctgacattggaggtggccccagcagcagcagcagcagcagcaacgccgtcccttccgggaccagctatggaaagctgtggacaaacggggtagggggccaccactctcatgtcttgcctcaccccaaacccccagtggagagcagcggtggtaagctcttaccttgcacaggtgactacatgaacatgtcaccagtgggggactccaacaccagcagcccctccgactgctactacggccctgaggacccccagcacaagccagtcctctcctactactcattgccaagatcctttaagcacacccagcgccccggggagccggaggagggtgcccggcatcagcacctccgcctttccactagctctggtcgccttctctatgctgcaacagcagatgattcttcctcttccaccagcagcgacagcctgggtgggggatactgcggggctaggctggagcccagccttccacatccccaccatcaggttctgcagccccatctgcctcgaaaggtggacacagctgctcagaccaatagccgcctggcccggcccacgaggctgtccctgggggatcccaaggccagcaccttacctcgggcccgagagcagcagcagcagcagcagcccttgctgcaccctccagagcccaagagcccgggggaatatgtcaatattgaatttgggagtgatcagtctggctacttgtctggcccggtggctttccacagctcaccttctgtcaggtgtccatcccagctccagccagctcccagagaggaagagactggcactgaggagtacatgaagatggacctggggccgggccggagggcagcctggcaggagagcactggggtcgagatgggcagactgggccctgcacctcccggggctgctagcatttgcaggcctacccgggcagtgcccagcagccggggtgactacatgaccatgcagatgagttgtccccgtcagagctacgtggacacctcgccagctgcccctgtaagctatgctgacatgcgaacaggcattgctgcagaggaggtgagcctgcccagggccaccatggctgctgcctcctcatcctcagcagcctctgcttccccgactgggcctcaaggggcagcagagctggctgcccactcgtccctgctggggggcccacaaggacctgggggcatgagcgccttcacccgggtgaacctcagtcctaaccgcaaccagagtgccaaagtgatccgtgcagacccacaagggtgccggcggaggcatagctccgagactttctcctcaacacccagtgccacccgggtgggcaacacagtgccctttggagcgggggcagcagtagggggcggtggcggtagcagcagcagcagcgaggatgtgaaacgccacagctctgcttcctttgagaatgtgtggctgaggcctggggagcttgggggagcccccaaggagccagccaaactgtgtggggctgctgggggtttggagaatggtcttaactacatagacctggatttggtcaaggacttcaaacagtgccctcaggagtgcacccctgaaccgcagcctcccccacccccaccccctcatcaacccctgggcagcggtgagagcagctccacccgccgctcaagtgaggatttaagcgcctatgccagcatcagtttccagaagcagccagaggaccgtcagtagctcaactggacatcacagcaggtgcgtttcatggtgacaaagtcagaagacaaaactgcttttaaccttgtccttgaattctgttcttcgcctctgccccttcctgttctttcccactgcttcctcagggagaatgcacttacattctcagggcacacaagatgctcaccccacactgacatctggcagagagtcaaacaaacatgtaggagcagccacaggagggctttttcgtttgagaattcccaagtgaagtagttactgcagtatttttaaaacatatatcctatgccagttctgcgttttgtagagttcctccgtaagaagcttgatttgtttgttgaagttttcttttcactatatatttaggtcagcccctggaagggacagttctacaaaaaatatttgttaacacaggggctaaacccttccttatcttaaactatcttaatagtttctgggagcccttaagggtgatcttatcaagttgttctctgtacttttgttctgtgatttcataatactagggcaacataaacagcagcgggaagcattgatttctattcatcctgccctaaaaagatcaggagtaagagctttttagaaatatgtatttagagagaagtacctatctattttgtgatctctcaagaaagtaattatgggtgacgttctccttttgttcatgtaccaggatttgtgaaatattattcacacaccgacccaccatcccacgggcctggcctctcttgtacaggatatgcaggaaactctgtatgtgtctgggacccattattaagagttatgggagttcatcctaggatgtctgccttatagttatctcttcttgcactgagacattacagatatcatttgggggctactatatatcttctgtaaaattacttttatttgttgagaagaatgcatactaagtcaggaacatgccttaatttgttttgttttgcattgagtagaagggctaaactgtataccctccacttttagggttatttgctgtgtgcctttaagttcaaaagtagacaccacagtaaatgctgaaagttggctttaggtcttctgtggctaatgccgtattaaaaatgaaaaacatttgtaataggaaattagcctgcccttcgttctgttgatcctgttttctggtggtcataattgtgggtagaagagagtacagtttgcaaataatgtgatgagttggcaatgcagaagtttccagcatttggaaacactttactctgacaaactgattatcttgtgaattttatctatgctccacagaatgagcttttaaaagcactgatttttcttaatttgtgtccattcataagaaattaatctgtgccctggtttcctattgacaggtatttatttatcatgtgttcatagtcttcttaattctgtttccaatatttgatccatataattctctattttatagaacaagaaaaaggtatatgaacactcaaatgaagattttgggtgatatgttacaaaaagcatttatttgatcagtatttacttcaacatttattttcatcattcactagaagaaagatttaattgtgtatatcaacatcagtagtacaaatcttgttatatcaaatgatgtttttgggagtcagaatccctcaacactttaagcatttgtattataaagtgcctcattggtaaaataatgagaatttgaagaaaaccagcccagcagaactaaaattttggttttaaaggagataaagagaataagtttttcttacttgtcatcttaatttgtttaggtttctttttatagagtagaataaatgatgtttgctctgaagagaattgatgaccaactagaattttcatttttaaaaagggctttaaaataaaattctcctatgtgttggatgcattaaaaaaacaaaaactctacaaaattctatccttaaccttctttgggaaaataaaatattctggaataatcatataatcctatttctaataattctggagtaacaatcgaccatgctttgcacagtgccaggaaaattctacaatgcgtatttgagatgtttgtgttggtgtttaaagtgaggcaccaaatgctacctggcacatttacatcctcaattctgcttgcttgcctgtgccctgttgagtccaaagatgttattctatagctatctgaaacagacagaagtcagacctgtgagtggcaaacagcttctgctccgaatgtgtgtgcaaacattattttcctcacttcctcagcaattgctgtctttgcttcttttcctcatttctcaggtaaaacctgagactcggtgaaaggaatagaggtatgatgaggcgtgggctctgttgaaacatctcggcttgtttaaaatttttcattgtctgttaagaggagaacacttgtgaagcactgagctcaggagctctacttgttggaagcctgtctgctttacctgtagtccagtgaccttttctgcctgccctttctcttgcatagcctcttagttctggcttgctcgttttctagtactatcccctgccatccctttgtttccacctcttatttcatgttcctgacattatcctttttttcttttgctccttttcagaatttcgcagtacttgtggcccactctctgcagagagtaaattgagagcccaagaagcagggcaaaaagagcctctcagactcggtcatagcagccctgccacctttacctggcatcaaatttatcttttagttttgaaactgcagctgacaaagacacagaccccagccatgccttttgggttcagtttttttgtttttgtcattctttgttatgccctccccctttaaaagaaaaaagaaaaagaaaaaaaacagaaaaagactctttccatttctttttcattcagtttccttttttgtgatgtcaaggattccgtacctccaaggttgcctcccctccctcccctttccccagccctgtggcctttttggctggcgcaaaccctctcggccctggcactttcccttttccgggtcacctccgcttcctgcattccttctcctccctcttccgagccccctttcgcccggggtgggggaatctgcagccagaccgccctcgggtctcccgcccccgcccgtctcgggtcatccagggcggtggggccccttcccgggccgcgtggtcggcgctggcgggcgaggccccgccctcgggcacagcgcgcggctctgggtcccgggcgggcggggcggttgggcgctgattggcccccaccacagccaatcagcatgtgaaacggctgagcgcggcgggcgcggggcggggctctccgcgggtccactggcggtggtggcgggcgggcgtccctgggccgctttctgccaccctgcctggcacctctttcccgcgggtgaccgcagccgaagcgcagcccccctctgcaccgcgcccgccgactgaggacgttgtgccctcagctgtattcttgcatttggatcagaatcctaagaatgaaaaagtccaaccagcccacggacgggggccggaaacacacacttgctcttatttttaattgagaaaaatccaggccgtaaccatgtgacgagccccattttgtttcccttctctctttactacggtttactacgaggccacgttccttcgtcttccggtctcgagatccgcgagcaggagggagtcccgcacgtggctgcgggcctgcgggccaggtggggttggcccgcgattcctgcccgcccccctcaaccaagggagggagagagacctgcgagtgctgcggatgccatcgttttgggtcatggggggagggggaattcctttggcttgaaagtgccctaggctccatacactttactgcaaagcaccagagctaggtaagagctgggaaaacgcatcctcctgggctgtgagggagctcacagcgaaatgaaagacgggactgcagcttgcagatcctgagaacccggtgtgacaagggtttgggtagtgtgttccttaaaggcttggaggaaatgctgtggcgttctcagacacagattcatttttccatcattgacagtcccagtgacagcccgtcaatttaggctgggcacatcgattttgaaagcttgctagatttgtgttgtgtaccctccagtaaccaaaattatgtgagatatattactacatgggatggaaaatgtgttcagatttggcctttctaaaataaggaaaataagaaagaaaagtgctatgggagtattttctcctcctcctccttccctctcaaataagcatttctcaccagccaacatccctcttgcatcactgaatcataagatcccagggcagcgctttttctgaggggccaagtgaaacatcacaggtggaaacgtaccaagcaggtgcaaatgttatgacccaaaactgctactgagcagtgggagagagtttctctgttgttccagaaaagtttgagcagctaataatttgcttaatgtttgcaattgtttaggtatctttttatagtaaaaataaatccataaaatgttgcatatattgtagtcatttctctgagttccccctcaataaatactatctccagcattgccctacaggaagagacttgggatccaaagggcatgccaccttttttttttttttaaatcacaattccaggaaaatagctttgtgctatcttaaatgatgcaatggaaaaagcagttcttgggagccagagatcttgggctccaacacagcctgtgcccttcactagcagagtgaccttgggcaagtcacttaatttctctggacctatttcttcatcagtaacttgaggattttgttctaaattattctaacctcctttgcagctctaaacataggaatgttgtggagaaaatgactgatactctttaatgggtcagttgcaatgaggattctttccgaagaagctgttgacagggtcatgataaagcatgagaatagcctgttctgtccatttctagcctttggatcagacattctttatggacagactggggcctggaaggaaaacattgtttgattcaggcctgacattaacttttcttgcttcaagggggcattttcgagttttaacaaaccctaagacaaaccctcctgatcgaccagcctaagtttttggaaccatctctagactgaattatgctcctcttccttccgcctttttaaaaataaaatgtgtgtgggaatgcaaggcacctgctagttcctacatcctaaggtcagctctcagaaacatcccacccctccccacactatagagtaagctttaaccagtgcacactgtggaaattaacacatgcatcctgttggaaatcacctctttttcaggggtggtgtgtttgtggataatgtgtctcatttgtaccatcagtgttcttcagtgagacagccatttaagtgaatggtaaggaaatttgagaagccaactggggactataggaggccttccacaattttttctttagctttatttttctctcttaggtgtatgaaacaactcaatatttctcttgctggcaaaattagtgttgtccagattttttgtgctttagggtttttgattagttagttgagccaacactgcttttccaaccctgtgttatcttgactgttgagttgccaatatattcagaagctccgaccttttttgtccctccatgtggatttcacaagtcattaaaatagtctgttgcctcttaagaaactccacggacttatgcttttccaatcctctcactataatcagatatgtgtcttagctgaatagtatataaatggttccttttattttgatgggttggtaatttagtatattggaacatttcacagttttaaggttttgttttgttttaaagaaagccatttcctcaattatttcctcatgttacaaagttactggaaattgtattcaaggaaaatagcttcttgtgaatcatgcttgaagccagtttcacactaaagatcctgtaactttttttcatactagtatttttttgcatgtaaaataatagatcctgcctctaccacatttataattatgtaactgatttattccttcgttaccttattagtccatagctatgcagcagactttgagagctgtctttaaaatgttattgaaacatgttcagaaagtgtaatcatattgaattttaacttaaaattacattttaacgttagtatgatataataattgcatactaatttcaaactaatatgacatagttacaaaaatttattgtaaagctttttaagaagataggttagtaagtatcatctatttgcttctatttttgtcttatactttggaaatggtagtacctctcccattcttaattcacaaaaagggagaagatggattggacaagtataaggtactgtcatgtatgataaaaggaacactttccattttaatagtattcttgcagcaggctctgctataatctatttgttgaaataaatttggttggataaatgttatttgtgcttattcagtgagccagtgatctttgaataatagagctttgaaaaagatgtatttatgttgaaaaggctttttgaccctttttctgtattttccattgataatggcagtagagttgaatacatgggtcagactatgattctagttgcagttttcttaaagcagagtagagattttgtggttttattactctaccaggaatgttttattgagtaagctgagttggattgcattcattgtattcctttttaccatcccaagttttataaatattgcatattacatatgtatccttgcactccacttttattgttgaccaaagaatactttaatgcatgttctctgatcctccctgacatatttaggtcatattgctgaacaatatcacttaatcttgagaagttttctcacgtttgttgaaatgatcaaagagacgtttttttttttgaatatatgtaatgtggcaaacaaattatgttttgcacagaaagtcatgatttttacttttaggaaggatatgatctaagtgagctagcaaaataataaaagacatttataaacatttagcagttagttaaaggccactggaatattgagtaattgctaagtagtcaactataatttatctaatcttctccaatcatcatgtccctattcacttaaaaattatttggagggctctatggatatgaaaaataattatgtttacccttgagttttaggggttgtggggacaatcagaagatcagaagatctttaattgtctttaatactattcaagcccaccacccatttctcaaccctaacataaattatctgcttttgtcaaataggccctaagccattttttcttgttcttcccctccccttcttttactcagtaagctctattgagcacctatcatgttccaaatagtacaccttttattgaaaggggatgaaggtagattcatggaaatggagggaaaaatggtactgagaggagatcaccaaaggagttaccaaatttcttatgacataagttatccgggaaaaccaaatcaagattccgattgtgtagttcacaaaagttggcatttttcataaacctaaagggcaaaagtgcccatctagcttaaaggtttgtatttttctgaatctttctaaccatggcttcctgtctgacaataccatcagcatactaaataatcaggaaggaactctcatttggaagaatggcccatttttggatattaagcttgcaaacataatattgacaaaaagcaggaaaaaagatatctttgctttggatctttagtcccagtgaaagcaaccagaagaagaggcatccagctgttaaatgaagaggggttgaatgtggacttgttatggggtggtcagtgttaggaaacctggggggaaagtgggggctacaaaataaattttaaagtcttttcttgctatcttagctttgttattcaaggacttttttcttttttttcctttgggtgggtggtttttatttttaatgaagaaaaggtccaacactttgaactgtggttccttgcttgcttctggctgcaagtataattgcttttgagatttttctccctctgttttgatgatatgcagtcacgtttatttttaagtttgtggtagtctcttacagaaacatgttttaaaagtttttttttttttttttagactaccaagttttataatagcttgctgggtctcttcacactatttttttctctgtatttttgtataggtgatacatgtacatgctgtaagtttccaattttnnnnnnnnnnnnnnnnnnnnnnnnnnnnnnnnnnnnnnnnnnnnnnnnnnnnnnnnnnnnnnnnnnnnnnnnnnnnnnnnnnnnnnnnnnnnnnnnnnnnnnnnnnnnnnnnnnnnnnnnnnnnnnnnnnnnnnnnnnnnnnnnnnnnnnnnnnnnnnnnnnnnnnnnnnnnnnnnnnnnnnnnnnnnnnnnnnnnnnnnnnnnnnnnnnnnnnnnnnnnnnnnnnnnnnnnnnnnnnnnnnnnnnnnnnnnnnnnnnnnnnnnnnnnnnnnnnnnnnnnnnnnnnnnnnnnnnnnnnnnnnnnnnnnnnnnnnnnnnnnnnnnnnnnnnnnnnnnnnnnnnnnnnnnnnnnnnnnnnnnnnnnnnnnnnnnnnnnnnnnnnnnnnnnnnnnnnnnnnnnnnnnnnnnnnnnnnnnnnnnnnnnnnnnnnnnnnnnnnnnnnnnnnnnnnnnnnnnnnnnnnnnnnnnnnnnnnnnnnnnnnnnnnnnnnnnnnnnnnnnnnnnnnnnnnnnnnnnnnnnnnnnnnnnnnnnnnnnnnnnnnnnnggaggggggagggatagcattgggagatatacctaatgctaaatgacgagttaatgggtgcagcgcaccagcatggcacatgtatacatatgtaactaacctgcacattgtgcacatgtaccctaaaacttaaagtatatatataaaaaaaagaaaagtttctagtgattaatctagcataacagtgaaaggggaaaagcataggttaaaaaatgatctggtttttcaagttggaaatgttcaaattaagaaatgtgtcttatttatttatttgtttatttttgtttgctttttgagacggagtctcactctgtcacccaggctggagtgcagtgacacaatcttggctcactgcaaccttcgcctcccaggttcaagccattctccagcctcatcctcctgagtagttgggattacaggcgtgcgccaccacacctggctaatttttgtatttttagtagagacagggtttcaccatgttggccaaactggtctcagactcctgacctcaagtgatccacccgcctcagcctcccaaagtactgggattacaggtgtgagccaccacacctggccagaaaagtgtcttaagtttttaaacaccaccaatttaaatctttactactttattttcttttcctgttcactttcatggtacttaggcattcattcccccaagactgagtgaataactagttcttaatatggtataatgggattaagtattaaggttaaggatctttttgaagactttctggataccaatgtctcatatttttcagtgctcaaaagaattaatgctttttattggaatagtctttcaacatttcaaattctgggagcaatttattttatacataagactacatacaactaattaatgaaatttatttacactagtgatgtcctgtcacttattttctccaaagttattaacactggacaggaatggaataaggagaatctaccctgtctcctaaggaaagtgtgtattgctgagataatttctaccttgaagcaaagaggagcttctctagtggtcaaaaacatttatgactggtaccctgctattcttgctaattgtggtccaggaagaggatgaatagaatggggtagctcttgctacaaaatagaaactttcgagaatgtggtaacagataacatttgaattagaggctgggcatggtggctcatgcctgtaatcccagcactttgggaggctgaggtgggtggatcacctgaggtcaggagttcgagaccagcctggccatcatggcgaaaccccgtctctactaaaaatacaaaaattagccggacatggtggtacgcacctgtaatcccagctattcgggaggccgaggcaggtggatcacttgaacctaagaggcagagattgcagtgagccgagatcatgccactgcactccagcctgaaagacaagagcgagactctgtctaaaaaataaaaaataaaataaaaataaaaaaattaaaaaaaaacatttgaattagaatcgtcagtgtttgatcgtttttttggtgacttaccaataagagtatagtaatagcagtagtgttagttttcttccagattaaagtaaggaggaatgaaattcatccatatgaaggaaatttttaaaaagctgttaaagagttttatatatgaagctatctagtttctcaggtgtatatatcatttagctttcaatatgtaacaaaccacaaccaaataaagtgctttaaaacatcaatcatttactaggtcacaattctgtgtgttggtaatttaggttgagttcagctgggcagttcttctgcttgtctcatcagggtgaatgcagtggttcagtcagttggaggattgactgggggctagttgtctaggatgctcttcctcacatatctagtggatgatgctggctgtcagttggtgcttgctattgactggtccacgtgtccccagcagactgacccagtcctcacgtggtattgaacaggttcccagcagcaagagcagggaagcaatgagtgcataaatacttttcaagcctctgcttatatcacatttgctactatcccattgcctaaagcaagtcacatagccacacccagcatcaaggggataaaatagagatactattagaaaatctgtattttttgacttactgtgataccatagtatactaaatgcagttattttgttgtcattagtaaatgtttatcaactgcatgttgaacatttagaataaaattattcttagatgtttatagtgaacacttctacctttgggtgaaatatcagtgatttccttcatactactttttttggaaaaacacaaacacttatattcccttaaataactattcattgagtttttctctgtgagccaggcagtggagactgaaatacgtgtgtccctgcctttgtggcactttacagggggcaaaaataaacaagtaaataaagaaatatgctactgcaaaatgtggcatgaggaagaggaagggcagagtgttatgaagtagaataatgggcactaccgtaaatgtaggggcaggaaatgatttcagaaaatacataatgtacttctattattcaggtttgtaaaggagaaacacatatttttatattacatgctttgtgggccaagtgcagattcaggtcttgatggcatctttttaagagttagatctccttaagaatacctcttattagttgagtgaaggctgaaagctcacccctaagtaaaacattgaaaaatgactattgaggtttctagtagtagatgcggttgtctctatttttagtgccattggtggatggtgaaaatatactatttgttctagatgtctactatgaactaggttagaggattacactttgttttgttttgttttgggacacagtctcactgtgttgcccaggctggcatgcagtggtgtgatcttggctcgctgcagcctccacctcctggattccagcgattctcctaccttagcacctgagtagctgggattatgggtgtgcgccaccatgccaggctaatttttgtatttttagtagagacggggtttcaccatgttggccaagctggccatgaactcctgacctcaagtgatctgcccaccttggcctcccaaaatgctgggattccaggcatgagccacagcacccaaccaaggattacactttgtaacagtcctcaggtggctcacataggacttgaaagcaaatatggtactggaagggaacgcagagccaggggatatcttcccactgtctcttcaccaatgacttactgcttgtccccacttacacaacaaactgagccacatgagaactggtgcagggcgctgggcattttgtctggggaggtggagagcaagggcctaaatggagtcagagactttgaaatggtttgaaagggctttcgctgcctgagcataaatctagatttgggtaacacaaagttgctgattattggaaagcaaatgcaaatggtttgccacatcctactcaaagcaaaggcagtactttagttaactcttcacccagctctcccatcagctactatttacattttgcttttaccagaatctcaaataccgtaaatgttcctgaggttacagaacaaaacaaaacaagacactgtataaaatatgtcatggaggggagccaagagggagagactgaaagttgaacgtggtggtatttatattgtgatcttggcagctccagtccacccccctaacccacccttactagctccctctgccccccttcccaattccagcatactctttgaaccacagctaaacaataacttcctttcaaagcgaatcccattccttctggttaggttaaggaatattaatattacatttttaaaagaataggtaataaattaatttctaaaaatattttatttccatttgtagagtaccctggaagttaccaagagtataattaaaactcccttttgcccaaacgtgtgtgtgtgtgtgtgtgtgtgtgtgtgtgtgtgtgtgtatttaggggtgaggaggagggcaagggagtggaaactgcagtccaataaaaaaggttacattcctaaaacttggtctttaaaaatattttgcagcctgagcctttagtccctcacaagtccctacagaggccgaccttcagaaagtgtacaggcttgttgtttcttgggcctttgaactgggtgaagaatgtgtctcaagatggaaaaatgaatggctggtgctttagcctccagcttgaagctcgctggaggaatgttattgtgtcttcaaagcctgcttcccaccacgctgtattagttagatgggctcatggaaagcgtctttgcattatcaagtacacaacaaaaacccataccacccaattcgatctaattcactggctccttttaggtggatttttaattaatgtgtctcttctctatgaatagagccctattccacggctccctccctaccccaactcaggatttactgttactcaccactttaggaaacttcagcatttttcttttcttttccttttttgtggatgggaaatattatttttaaaaataatggcagaagttgtttaggaacaactctcttagctgagaggagttctgaatggatttccagcgaaagtaagtaaaattgcatttgcaatgtaaaatcaatgcctttaaatgcattgaccaaagaaaatgcccaaatcttttattagctgggttcaagtgtatcaaccaccctgcctctccttttagttcagaaaatttaccccttcatgaaggatgatggaagcagtaacaccacctgtccttgcttcagttactggttttatggcactccttcctactaaaaattgtgagctatttgagagtaggctcactcttcatttcatgactccattatccaagttggtgctcacaaaacgcttgacacattgaaaacatatttatcaacagttcagggaagagtcttggatcaagggagaggatggctttagaaaagtttcaaacaagaacaataatgtggatattttttgagtatctcaaaccatttcatttgtccaatatttaaaaaattcagatttaacaatatcagatatattaaaaagtccatcaaaattacaagactgtaatctggtatgactgaatataaaaacttggataaaattaattgcaacttcctatgtatcttaaatcttggacacttcctcccttcccccaaaccattcttttgaagattgacaggaactttgctttgttttgacaagatttatttttgtgcttccaacagtagctcatcaacttttattctactagtatagttcttctgatgttaattgtagcttactgatctaggtcatagcatagcatttttactgacgtttcagatatcaaaagcaatgagaaaattatttgaaaaataagcattatatcacagctacctctattttaatttaatttaatttaatttaattaatttgtttatttgacatggaatatcatgctgttgcccaggctggagtacaatggtgtgatcttagctcactgcaacctctgcttcccaggttcaagcgattctcctgcctcagcctcccaagtagctgggattacaggcacctgccaccatgcccagctaattttttgtatttttagtagagatggggtttcaccatgttggccaggctggtcttgaactcctgatctcgtgtttcgcccgcctcggcctcccaaagtgctgggattacaggcatgagccaccgcacccggctgctacctctatttttaaaaagaggtcagttagaaagtttgtgattcatagatttccctcctgatgtgtcccattgctcctcctttttcttcctctttgttgctaattagcccctctactaaaatatgcataaggtttaggaaaaggaattaaatttaaatgagtccattttgccagtgtagcccttggtaggtactctgctaagatgttaccttggtctggaaaactgaacctaattgctttgagacttttcccctgcattccctgacttttgtttccacacttcattgaggctggactggtgtaatgaccaaagtaatggaatgtgtattctaaactggtgtgtccgctactgtagcaattgtttttaaatattgttggacatttgaagtattgagctaaaacttaggatccaagaacttttatagtacttacagcagaacatttgtcacatttgggtatgaaacccacaactccacaagatctgtaatataaattagttctattttattttaaataagacttcagttttattggcccttcacggttgattcacatttttgctgctttctaaaacttgaagatgtgtgtccttatagatatgtgtctggtattgagctaggctatttctcttttcaccagcgtggctgagtagatttgaatgctcagtggaatgagtctggcatttggtagatactgtttgttgtatctaaataatgaatgaatgttggaccataggattttaaagcacaatatggaaatataccaacacctcatttatctgtagaccagaatcatatcctattcaggaaaataaagtttttgttaactacattactactgctaatacttggtgggtattgaatattttcttagatttttccattcattgcagaagtaagctgttgtaattgctgaacctgaaatttaaaggaaatcataaccaatcatgaagatcttggtagggagtcgttgaagactcaaatggttgtagacctgtcatgagagagcattctggttaagtggtacaataaggagttagtgaatttctactgagtaccaggcatactcctaagttcttgaattacaactgtgaagaaaacagacaaaacttcaagctttcttagaacttcctttcttgagggccatgtgagtgagaaagctatagaggaccaactttcccagggcacatttttgtgatgtaatagggcaaattataaaagagaaggaagtaagagttgaagttgatgtatatgtgcttgagagagattgtcttacatgaaagtcgagatctggaacaggtgacatattgagagaaggatgttaggagtatgtggtacatctgggaagccctagagaagactggggctggccacaagtgtggccacctatgtgtactgggcattgggtgttggagggaacagggatgtcatgaaccatagcttatgttgcagctttggatggtagtaattttcactaggtattgtaaagagttttctttttaagactattatgcaaaagtggtaatgtatatactctaacctttcttttccaaaagttttttttttttaaattctgttagaaaactatttaatgtttgggaggaaagactatcttgaaactgctcttatgtaaaaagcttttactttggtattgctgtgtattttacaagtaaagatcttcaggcatattcctgttaaatccatacatcacaagaagaaatctcacaattttaaggttgctttttctagtggataacagcttttatggtgaggaaattcctttatcgctaacttaaatccttcatttacatgtgagagaatttccctcattctgattttagtagtggtgacaaatagccttttttaaaaatcatgaggctataaattatatttttatcagaagatttaaattatagaaatatactgtaaagtactattaagttctaaaaacaaatttaaaataaaacacgatgaccatatttaaatatgcagaagaataaatggaaaaatcataaccttggtactgcaactaatcagtttgctaaaagaggaaataagacaggaaatgaattttctaagaaatgcttagaaaaaatatttataaatagaaaatattttataattgatgagacaattctaattaaactgactatgacttttctgggtttcaaatacaacatatatttatttgctgaaacttaataatagggtcagtggattagtccattttcacactgctgataaagacaaacccgaggctgggcaatttacataagaaagaggtttaattgggcttacagttccacctggctggggaggcctcacaatcatggcggaaggtaaagaggagcaagtcacatcttatgtggatggaagcaggcaaaaagagagcttgtgcagagaaacccccgtttttaaaactatcagatcacatgagactcattcactatcatgagagcagcacaggaaagacccgccccatgattcaatcatctcccaaagggtccctctcataacacatgggaattatgggagctacaagatgagatttggatggggacacagagccaagccatatcagcgagtttcctctaaaagaaattttccatcatctaactattctatgaagaacaataattcatcaaatacagtttacaatttggggttctataagtggtaaggaactttaaataggtttgaaaatcctttggaaaacaaaatacctgaatatttatatagtcacctaagcttgttttatcactcatttttaactcaatagcatttttaaaatacacttttttatttcaggacagttacagatttacagaattatcccaaagacagtacagagatttactatgtaccccatacctagtttctgcctttattaacatcttgcattagtataatacatttgtcacaatgaactaatgtgacacattattgttaactaaagtccatactttattcagagttcctcagttttcccctaatgtccttgtttttctgttctagggtctcatccaggataccacatggcatttaatcattatattatgtgtctccttaggctgtatcagtttcccagatttttcttgttttttatgaccttgacagttttgaggaatagaatgtccctcatttgggatttgtctgatgtttttctcatgattagactgagtaatgtgttttggggatgaagaccacaaagagtctcactgtgttgcccaggctggagtgcagtgatgtgatcttggctcactgcagcctctgcctcctggattccagcgattctcctacctcagcacctgagtagttgggattatgggtgtgcgccaccatgccaggctaatttttgtatttttagtagagacggggtttcaccatgttggccagactggccatgaactcctgacctcaagtgatctgcccaccttggcctcccaaaatgctgggattgcaggcatgagccacagcacccaaccaaggattacactttgtaacagtgccatttcatcaccttgataggtgccatttcatcacctatcaagtgtacctgttatcaacaggatttctcaaggtcgatgttgaccttgataacttggctgaaggagtgtttgtcaggtttttctgctataaatttagccttttcccgcctttccatattgtgctctttggcagaaagtcacaatacacaacccacaattaaggattgggcagttatctacccacccccacccgaaccaccccacactcacacacgattcttctgcacaggagatttgcttcttatttacttagtcaattctatttatattagtatggactcatggctgcttattttatacttcaggtcataatccagtaacactttattttgttgctcaaattgttccagctttagccctttcagttggcgcctgtgtccctttgacatactcccatcattgtgggttcttgcttttgtattttttttgagcattcccttactttttgacactccaatatactacaggatcaccttgtttatttcctgccccagttctaaaatcatcagtttctctaaggagctgcttccttttattggagaatgtacagtctgccctctgtaaccttgggttctgcattcatggatttcaccaagcacaaatcaaaactattcaaggaaaaaaaaaaggatagttgcatctttactaaacatatacagactttttccttgtcattattccctaaacaatacggtataacacttatacatagcaactacattgtattatgtatcataagtaatctaaagatgatttacagtataccggaggatgtgcataggttatatgcaaacactacaccattttatacaaaggacttgagcatccatggattttggtaggcacaggaatcctgaaaccaatcccccacagatacctgatggacaattatattggaaactaagatctgggaactagcagtgtttgttgctactgagatgtcatttcttctttgccttctcagctgacagagcatggaaatgtatgtgtgtactaacccatacgtatacacatatctataaatatttctatatgtaaccatctgtatctgtactaagccaagcatgagttcacattgctgtctctaactccaatccatttccacatggaccattctcgcctccttgtttatctgtcacctcccacctcaacagtgtgaagtccggctgttactatccttgatccatttaattgtttgttcaatttcactgcatacatatacatagcagttcaggattgttaactctagccccatgggaaacaactttatcaactagagtacaatgcttctgtcaagtttcttttgcctttagtcttataggttcccctcatttccagagttacttcggtcagcaccttattctcctacctcttttactgaagtcttttcatgaatttataacacatttagattattttgtcacattctgcattccatcctgggatcagtgacttcctaggtgtatttttttatttgcatacattaaagtttactgtttgtgctataaattctctgggttttgacaaatgcttaattacttgtatttaccattacagtatcatgcagtatagtatcaaggccctaaaaaatgctctgtgcttcacttattcaacccttcctctctctccccaacccctggcaatctctgatctgtttattgtctctacagttttgccttttccagaatgtcataaaattggaatcattatagtatgtattcttatcaggctggcttcgtttacttagcaatatgcagttaagattcatccacatcttttgtggcttgatagctcatttctttttattgctggttaatactcttgtatggatgaaacatagtttatttacctagaccaccaacctgttatgaaatgtttctctacatgtgtttgaagacatttgtgaagtcaggtctcagctttcctttaatactaaacatttttaggttttactcatcattcttatttttaaaatcttcaattaattttgtggctctttcccaaaccttgaatattttttttgtttgcttgttttttttacatcattttcctcccccaaattgtccaacattctgtagtacagtgtttcaaaccaactccacactggacatagttggacatttgcttcccgatttccccatgttctctccattttaatttgccccatgttagtgttttactttttcagagacagaactttataggttatgtaccaccttggaaccactgtgatcatcagagcctttttaagccctcttccttgaaggacagttatttgcattttaaaaaacagatttatttgaacctatctaccagtagtctttttaaaaaagtattttgtgattttgattcagtatagacatttacaacatttttattctttcttactataacggactctcaagtctcggggaatcaagttaatgaagttcattgaggcttggctgttgtgctttccggacgtccagtgggaatctggaactgcctggactgcctggtctgtagtgtaggaacagggctttctctgttggactacagggaattatctctgggatcataaggagggccattctgccatgcctcactgtctatcacctttatgtgaaaaagggcagctactatccaattagctaaaagggcttgaggatcatatttatacagtctttcaacactcaacaagtacttttgaacctttactaggtacagcatggaatcagccttaagactactctcctggagtggttacagttaaccaaggcaaaaccccttcttcgccttcctgggggagatgtgatggggaggggctgctgggtaaaggggcaggcgatggtgtaggaaggagttcacaaaagcacacatgttttgtttaaggaccgagatgcaaaagaaaataaaatcccaggtatgctctacagtcccattcttttttttttttaacttgcaagctaacaagttatacagtcccattctacacaatcttttcttttttttcttttaaaaacacagacattgatttttctttctctctcaccgaaattgtctcagcttgttgtataattcttgcagtagaattcctgacatgctagatcatacagattacagtgaggcttcttttataccagtgtgtatgtatgtgttttctccatatatttagagtttcatgtgtaatatttcaaacaccttcccttataatcagtttggctgtctgtacttgttgactgtgaagggccccagaagagttgtttcaaacagagaacccagctgtttctatatatacatcctattcaccaaaatgaatctttgcaaaaaagttgtttttaattgtttaaatattaactaacctgaaacaaaccttatgttcctttataaactgatactaaaaaacaggaatatatatctgccaatggcctttgtttcaaagtttccagaaatagtccagctagagttacataggtcattagctacagacctctacggtattctctttagaagttctgtggctgtttgattttgcttgtttcatgctgtcaccaaagcctaaaaggaattggtattactggactatatttgcatttagagtgtgaccagttctctggagtacatatgctgggctatttatgaaacaacttcagctgacagctgaagatcagaagatgctattttgggaagtgtcctaaatgtgaggttctgtggtgaaaaaaaatttagtgtcttacagataagatacttaaaacaggaagcagtggtaacttactgcttcctgtgtaaatatccttatcagcatgataagctttaggtttcagttctgctttcctgatcccaagatttattttcttgtaatcatcttctataagaggacttagaatttttttttttttttttttactgtccatgtagggggaagagaaagaatttaccagcatcatttttcctgtcttgataaggtcctgtcatttcctgccactcatagtatttgcttggctaagagacaaattatacgctactgttcactcattcattagctatatctattgtgtgtggatagtattgattctgtatttgttttagtgcaagactaggttgactattataagtgaaagatcaaatgaaagtatagaaccatcatggacaagaaaagaggagatgtgaattttattcccgattctgccacctcctgggaactgtcattccttgacctgattttctggttcacaaaattggagatagtaatattgccccagtctgtcttataatgttgttttgtggatcaaatgaaataacatatgaaagtaaaattgtaagctgtgaattgcctctcatacacagagtttgtcatggtttgagttatatcccaccaacgcccctttcacccttagaacataggggtgcttttggtttttgttccttccttattaaaaatattttttgaactcagccagcttcctagatttcttggctgtaagagtatatcaagattgagtgcctgaaaagatacaacagtgttgagtctcttgttcagatatttattttatgaagtatgagtatggtgtactgttaaattctaggaaactgggttgcatttattagcttggcatagaaaaagcaaagttctacatgtgggctaaattatgttacaagctgtaagtataaatcaggattaatggctgaaatatatttattaaactttaaaaggagctaggtacatgcattttatagttcctgtggatttaattatatataaaaacttgaaaataaaagtatgactggggagtgctgaatgttttcttctgtagaattcttgactctactcttgagtctcagcactctttgacagagagatccagtgctgtgtgctgtgccaggcagaaggcatgagcatcttaaagagatggatttatatatgtatataaacatatatatagatgtttaagtatattatatgtatgtttaaatatgtattatatatattcaagagacatatatacaacaatttacataatccatgctgtaaggaaagcaaaataacgaaactactaaaattctaactcctggcctctgggtaattataaatcagtaactaactgtggttcatggctctctgtaaaactgtcctatgaatttcacccttcctccaacctactcctttgttcctctcctcattttctattttgcttttccttgagtggtggagccgaatgctctgaagtaattttggaacacagtgagcctactgagccaccggacagccggctgataccatgtgcttgggaacaggaaaggggacccagctataaactcctcagcagccatgccatgccctatcaccgtcatccttccccaacaccttctgaccttgataaacacagtcaggaccaagaatgtgctcatatttacatataccactccctcccataaaaatagggtaacctttaaaatcacaaacaacacagcccacactaccaacgttcttccgtcactgacagtgacaggatctagctagttctcatgctccaaaagttatatatatatacatgaactttaaagagagagggtctcactctgatgcccaggctggagtgctgtggcatcatcatagcttaccccaaactcttgtgctcaagagatcctcccacctcagccttccaaagagtccagtttattgagaaaaatattcgagttaaaagtatccctaaagataataaagctcagaatgttctttctacagacaaatagactcaggaccatacagtgtaagtaacttggttaagatgatacagctgttacatggtagagttagcaaacaaaaacaaaaataaaaaccctgatattctatctccaggttaatgttttctcccatgctatactacatcaggttgtacatgtgtaaaatgctttgtctgttttgtatctttatatacaacatgttgtacatatatgttgcatattcacatatatatgtgtccaaagactgtatgttatagatgtcattgttcattcatttgatcctcaaatatttgtaaagccattcactattttggctttactatttgctgggaatagggctaggaataagacttcgtttccacacttctgagcttatgttctagagggagaaataggcactaaacagatcaagttaattcagatagtggtaagtactcttaggaaaaattaggcagggtggaggagtttatgaacaatgtatcatactaaatttatcaaagaagctaagtagaccacactcatatttagttttattgtttttgaagtttcttttgaaaaattctattgggcaagatgccattcagcaattcacacatgtttgaggggaaaatcataatttattagaataattaaaggctttaaaaggtagcttgttaaatgaagttttctctttcatatgtggagtgtttgattattagccctgcttgaaaatactttctgaacactggtaatcaattgcctgtatctatgacatagtcaaccctagtcataaagttttcaaaatgcattcatgactgctaggactttattactgctctttttttttcaacctcctatatcctttctgggagaggagtagatttcctagtgcctccactgcttaccagacaggagagcagtgaaactgggaggctacattttgtaagacttgaacggccatactttatatggcagtaaggcgatcaatggctgatatgtctcaactaagatgaatgtatacttgtgatcagtgaatggaccgataaattcagaaaagttggaagactccattccattggcttatgactaatttttatatgcacctgtttttctggagtcataaatagaaagttttctagagataacgacaagagtagtccttccctgttatctgcctcattcctactaaaacaatagctttgttaaacaactttgaggttataatgatgggttgataagttgttgcttttcaagtgaaagttaagtttctaagcctcccatgaaacgcgtcggaaacctaaaacaacatctgcatgtctagatcttccatccatgtctggttggctggaaggacagcctcgaaatggctctgtggttccttggggtgctgcaggcctgcattgccttggtctagtcttccatagatctaattgctttctgaagacactccgggcagtcttgcagcagcttctgtttccttgccggtcactgattatttgaacctggactgtcctgagttcagtgtccatgtgtactgcactgccagtgaccatctttggcagggcaaggctgatggccttagttgtcttcagtttcatcatctgttcataactcttttttgactctgcttagtggattttcatctttggcatgtattccgtgctttaagaatatatggtcacagagtgattcggtgatagtgggagtattgagttgggagaatcctattactagtttctaggttctgatggtctcttcagttgcataaacaatattgcaatatattgaatatagttacataaaacatattgaacatgagttcctattttgcagacaagtgttacaacattgttgttagagaatgggtcactgaaggcaccatctgtcttgcctcagtgagctctggttactttaaagaaggattcgctgggtgcggtggctcacgcctgtaatcccagcactttgggaggccgaggcaggcagatcgtgaggtcaggagttcgagaccagcctgaccaacatggtgaaaccctgtttctactaaaaatacaaaaattagccgggcgtggtggggggcgcctatagtcccagctactccggaggctgaggcaggagaattgcttgagcccaggaggtgggggttgcagcgagccgagatagcgccactacaagattttggagaacttttgatggcatttagattggtttagtaacagccagaacctagtttcacatgaattttaaggtcagcaggtacagaggagagttcagggtggtttactaagctgctgttggtacaatatttagcacacaaacattcaaatttttgattagccctttggctttggtttggtttattttagtcttattgatgattatttgcttattattttaatatttcattactttataaaatatatttgtatcaatgcaacaagtatatgtccattcatttattccaaatctcattccttgttgagatttgctatgtgcctagacacatttttggaaaacagagactatgtggtgaatcagacagatagtaggtttctgtgttcgtggagtttttattattccaagggaagaaacaaatgataaccaatgaaatagtgtaaagggatagagaagaatgggtagggtgggccatttttgataagggtagccagaaaggaggcagtgactgagcaaacatctgagtgaagtaagggagagacttatggggcgaggctgtgtgctggtgaagagtgtcccagtagaagcagcagatgcagaatcctatgctgggaacgatcctatgttccggtgcatctggagcagcagggatggggtagaaggtgtgattggggtagtaagctagggtctcacagggcttcataggccatgggaagttgcttgaatttcattcaaagtatgatgaaagcctgggaatgtcagtgtgtgtgcctggaccactcaccatgttactaagttttattctagagggacatggacttcttctgtgtgacgtgttactcctcatgcctttgagtttgatagtgccaatcagctgagacctcttagataatgaactaaagccacctctaccctagattttcatacattcattaccagcatcaccgaggcttattttaggggtggctccaaaaggtttcttttttagtcttgccacagcggcaggctgcactagcttctgagatacccattggtcaaaccaggccctttgcgtattgccaccagagttcagtcctagttccaggcctgtctggatgcttggccacccaggttatgatcattaatgcattccttgcaagacatgtgtgctctggtttctttaaagcaggatctcaattctataaagaatggctaagggcccttttgttgggggtggggtgtaaggtgctcattttaagcctccaccaaacattccagctatcaagaatttatcccagttcttttgtattttgagttggcctttttttattttggaaaccatgtcacctgacgtgacccattctctcattggcccttattatggcttgcgcttatttcagcactctttttatcttaagtggtttttaggttatgtgatccaaatttagccttgctgataacacttggctgccatttgactggcactgtgtagaagtctgtatgttttaggaagtagagtattagttcattttaatcctttaatcttcctgtaggctagatactattctgctctaacacctacatatcaggccttttttctggtgacatgcaaaacctgtagtagaaacatttggcactaatcaggtaaatgtgagtttgctttgaccttcattgccttttttttttttaacttgattttactaacttcctggaaaattatgttggctgagtaaacttttaatgatgttttttattataccatttgcttttaggtgttaattctgtgatcattcttgttttgagctgctctcgacagctggctctatggtttcatgaaggcatgctagtgggttgatgaaaccgaatcctaccatatggaatggtggcaagagagtgatcttcattatttgagttcctgcaattataaggttttagtagggaagcagaagacacaaaaatattcactaatgaactaagcacttctaaactctgcccttgcttattatctctttatacttaataccagtgatccttcatccagttttattcagtgtggaaatacaccttttgtgaaagatgcagcatttcataaagtcaatgaaagtaatgctggtggattgctgggtttcacaagcagtcaatgaccagtaaagatctagcagatgagtcaactgttgaagaaacaaatcaaagataatgactactttagtacttctaaaatgcatggtaaaaatagtataggattggctgggcgtggtggctcacgctgtcatcccagcactttgggaggcaaaggcaagtggatcacttgaggccaggagttcaagaccagcctggacaacatggcaaaaccccgtctctactaaagatacaaaaattagctgaggttggtggcacacgcctgtaatcctagctactcaggaggctaaggcacaagaattgcttgaaccttggaggcagagattgcagtgagccgagatcgtgccactgcactccagcttgggcaacagagtgagaccctgtctcaaaaaaaaaaaaaaaaaatatatatatatatatatatatatatatatatatatatatataagattaagagagggccttgggaaaattcataaaacctttgaatatttctacagaaatgattctttttatggttgttccatgatgaccaaacaagaagtcgaagttgaaacgtgaaggaaaagtaatccaaaaacatgaacacttgatcaaactttgttcatttaagaattttctagtagattcaattaaaacatgctttgttaaacataaggtaatatagttttttcatatatttcagctttattccctagtgtaaaatttcagttaaatccatttacaataaaaattaggtccatgttttcaacagatttactttttaaagtggcttctgtttggttcctgttatgttcagctgatgaagacatcctgcatagttcttttacggaagtggcagaggagaaatgtgggaaagcctttcctgttcctccccaatttttgcaaagtaggaactggagttttctcgttgctccaaagctgtgaggccagctgttgagtaggcaggtggaaaagctccatggatactttactcctgtgagcctaggaaagtccattagtgctcatggggttgttttagagaactcacagagagcaatattagtcaactttgtaggaaacccagataagttggcgattccccacagggccccgataaaaagtcttcctggcccttatgtggaccagtccaggagtaggatgcacagagtacccttcaaagaagcttatatgacaataaatagtgattcagtaagagtttttgctacttgttagtcaataaaaatttaaaggcattatcttgtctctaatttccatttcagctcaactgtgtatttcccgagggaggtaagtctaagcagattttttctaagaaaagaatatgaattggtgagctgggcatagtggcacatgcctatagccccaactactcgtaaggctaagatcagaggattggttgagcccaggagtttgagtcaacctgggcaacatagcaagaccccatctcaaatgaatgaatgaatgaatgagtaatatttataaaaagaataggaattggtgaagctatagtgtaagcttgcgagagctaaggatatataattcaaaaggagtgaaatagaagtataagtagattttcttgcctttgaggaaaattaacaagaaacaaagtttgtgcgatagacttctaagtacactatcgacagcatttctataaccaccgcttaaaaatacatgtacactgttgtctttaaggagtagttgattagtgtcttatggtacatcttgtagaacagcaagctaggcagctggtccatttctgatctgctcgcatatagatgagcaatcaaaccttgacgacggcaacccaagaggtgaattgcgcgaggattcacagaggttatgctgtggcgcaccctcactgtgatctgctttaactcccttttctaggaatgctaatgtcaccctctttaattctctctcctttttctggtcttcattgagactaatgatgtatgtgtcaggctttgagatacttttcatgacaattttaaaagtctctctgtaggtaaatagattttctttttttgaaacagggtcttgttatgttgcccaggctggaatgtggtaaagtgatcatggctccctgcagcctcgcactcctcgacttgagtgatcctcctgccttatcctcccatgtagcttggactacgatgagcaccatcatgttcagctaactttttatatttttttggagaaggggtcttgccatgttgtccaggctggtctcaaacttccgacctcaagcaattctcccacctcgacctcccaaactactgggattacagatatgagccactgttcctggccaaaaagctgtatttttagctctgattcttgccacattccattagtgatccttcgatgtttctaaaggaacatacaccatagcagtgcagaaaaagcaaaaggaaatattatttaggaaatctagtatggggggaaataataaaacttactttcagactgagtggaaatgattcttggagtgtgttctgctgaagtttatccatgatccatttttcatcatttggcatgaactacagagttgtgtatagggattttcattttatttggatttgaagttcatttactatacaacggtcatacaaatgagtttggaagctctgattactaagtgattggcccaaagattatcataggatggattagtaccctgagattcattgtaggtttccacaatgaagaaaagagtagcttgggtattgctaaaaagaaatttgattcaaaagtcagttattgtttgtttgtttgaatggaagacttatgtagggtctttttttaaatggcaattaaaggtgatttggaattactgggaggatagtgaataattctagatgaaataaaacttgactagtatcacagaaaccaagagagaaaggccagaatacgtagatacctgggccattggcaatgggatgcactcaccatgacctaatattttggaatgtagctagtcaaggagagaactatttctgtgtctgtgttgcttttggaaagcagatggcatcttttaaaaaatagccttgaaattcaagctccctggattgctcgtttcattttcacgttggcattcaaagggggtaaccaccaggatctgagatgtggcatgcatgaatggcagtttttgtggattttgttgtagtatttttgtcataaatgtggacagtagtcttccaagacagccttaatgcaggactgtgagaatcttgtgtaattcaagactgtagaaagcacaacatggtataaaaagaaaaaccccaaaaatgtagtaatttgaataaaaagaaaccaaaaataggatggtatgggaagtgtttagggaatggtgaattcaaactaagatgcccctccagcagtacaaggccttcagcaatgcattttcttcagtttcttttttcctgaaaccaacagtcttccctttcttgccgttggaggtactgtatcatcatttttccccctttatctttctattcagaaagttactgtacattctttgttgtaaaagcatttaaaggaagatgatgatataaatgttcccaaatgagttttctcttctggatgatcgcaagagtattatacttttttgtaagaataacaaatgcacgcctgttaacgctctggcagaccacttgttaggtaagagttttacctgattccttccattggaaaggtgttttatatttgtaggcttgtcactttgagctgattttgttcttatgatcagcctcttttggatttttattcctgatttacaatgaaatatgtattcggctggtgcaaatgttattacaggtcttggcattttaaaagtaatggcaaaaactgcaattacatttgcaccaacctatagttcttctggctttacagtaggccaggagccagcaaactagggccaaatccagctgccacctgtttctggaaagcttattggaacacccatttctttatgtattgtctggctgcttttgagctacaatggcagagttgagttgttggggtagagactatacatggtccacaaagcccaagatatttgcaatctgaccctattagaaaatttgccaatgcttcactggctaaaacttttagtgcaatgagtaaattatacagatgcttcactagtgttacctgtggtaggtaaagcttatgtttagataaagatttgctctctctctttttttttttttttgcatttttatgttctgatggcattttagatagtaatatctcaagaggtatgagctgtctgtctattaattgtcaatgcaataagatatcaatgataacttcccaaagaattctggccagagattccaagtgaggatgccacccctgaatagtgatagagcatatttatagtcactaaggtcaagattttgagtaactaaattaataaatcaaaccaaactcacatctcagtttttctggaaaataatgattgctggttgttggaacaaaatgaaccttagggtgcctagtgcttctgtaatgagcaagggctatgttgtaggacaacagctcagcctctatgctgccattttagttctttctgacttgctttttggataagcggaatgcagggcacccatgcaatccaataaccagaggtcttggctaaaaataatggaacagtttaatttttctgtagtttatgatggaacataatgccacctggcaacctctgttatccatgtctgtacttatggctttgtcatgatttccaaactgcattcatggaacagtcatttaagtttcaagattgaaaatttgtagctaattatgttagggaactcttccagagttttggatttggggaatttcaggtttattgaggtacctataaaattctagttctgctcaaattttaatatctgaatcatctacaacttaggattctttgtgggaagagtaaagctctctggaagctcaactagcttttattcgatttaaagtttgataagaaacaaaactgtcactataagtgacagttgaccagagtggagaagggggccagaaagaaacagaggaatatagcaaagtaggaaagtatcagagagatacaatggatactttttttccctgggatagagctcttggaagttggtatagaatgacaataaacccggcagtcacctgggctgtgtacagcacaattccatggaattgttttcacacccagaatggtgtaaatagtgccccctgtagttgtcctctcaaaacctcagttacagcagccaaatttattaccaaaatgcattccaaagcaattatgttgttgttttagaaagctgaattttattggtctgctcttctcgttaaaaaccaatagttaagaattggagttgtctatatagtcatattcctgcccacagctacttaggtggtgtagctcaatatagaacccagcttgatttctaagtttagcttcacatcatgagctggcagtgaaccctgcaagtgttggttttcatggaagcagcatggaaaacatcagcaattcctgcatctctgctgaaatgcacatatgtgaatctgctgctctgaagaggacagaggtctagggttaggtttcacaatcatactttcacaagattgaccttagctttctgcctatttggttccaagtcttctggtgacagcaaaagatagcactttggacttcagacagctttgatggcaagttttcaagctttttttcttgcaatatcttttcaataaggaattgtttggtgtctaataaaagtacataattcaattttttaaaaaagcaaatcatatccttcctagcatcatctgaaaatgggtagaagagggtgcttgagggattaaacatttagccttgtgtatgcatgcatgcaagtggttgccttcatacgtgcccagatttataccagctgtgcacttgttcatcttttgtggaggggggtggggttgagggttttcctctgatgcagagacattccagatggacaagaatgtaaatgccaggttgcatttttaggggcttactaatggagccacagcagattaagagggtaaaaaaaattatgaccgcatgtatttgtagggaagtgtggactggacactattagatttgctatctgtgagatcctcttgtattgacattttataaagtaattgggtattttcaactctctctgaggagtaagaatgagattcttgatgccggcttttgtcaaaataatattttaaggaacattttagtaaagccacttattgaattgtagttttaaaattaatttttaatcttgcaataagacaaaaaaagaaaaaaatttaatttgtgcacataaatgactcatttggatggtagacttattctatatgcattattattattattttttttctgagacagggtctcactttgatacccagcctggagtgcagtagcacaatcacggttcactgcagctcaacctcctgggcttaagcgatcctccagccccagccccccaagtagctgggactacaggcatgcgccaccacacatggctgttttgtacttctaaaaatagaggtggggttttgccacgttggccaggctggtctcaaacgcctgagctcaagcgatctgcctgcctcgcactcccaaaacgttgggattacaggtgtgagccacagcacccagcgcataactcttctttctcagctaagcctatgtacaagttccaacagagtgctaggagacaaaacatttcagtgcattttcatggctttgtttttcatggcatatttgcattttattgtgacttctgattctcttgtattttctctgctataaagaaactatgtagttttaagttatatcaaaaaagggtgtttatttgtctttgcatgaattttgaaaaagttttcattgttttccattcatttaaaaaatacatctgaaaatgtatatctgctttaatcataaaagtgtttctctgctcacatgatcttcattcagctttagtgagaaaataaatttgggcacataccaactgttactatatgataggaagtgctacagaattgtggaatgtgacttgcttcagcagctgtttgatggctaatggttcagggcatttgccagctgccatggttctgccatggttcattggggctgtgtcaaaatccttgaaaacttcaggctcaagaacccagagcttatttgaccctttattaagtgctggtactatatttagaagtttatttgctgcaaacctctgtaaacattttctccagactaaacgttttcctttgtagagagaatttttccattttccagcatggcattgtaaaaatctagcaaccatatctcacatttatataagaaagcatttggaattgtctttcaaaaccacatgggtgcctaatgaatattacttgctagtttgtgacttttatttgtgttttgaggcttgtgtaatcccttgcaccagccccggacacaggcagttttggatattagagccgattttttcattatcccccattgggcctctatgagtcatactctggacacaaatagaagtgaatgtataatcacacaaccacttattccacagttactgggcaaaataatttgtaatgtgcaatgagcatctttgctaaaggaatttacaagaaggtcttgaaagacagtacctgtatctatctgtagagcatcacaaatttcacttccttggatattttaggaagggtaggttgggtgtgtcctgtctggctaatttggaggtggtttccattagcatccaatcatttaacctcatcccttcactgacaccttttttttttaaactccctgtaaacatgatgccttttatgtttcatttccacatttctagcagtagatacttgaggcacatagagatatcttagaaaatattgtgtatcatcacagcctcttggaaaccaagaaggggatcaaagtaattgtctgattcattataattatttctatattatatcaaagtttaaccctctaataagaggaaaatttctacccaagtctaaatatttatatttaggcattcaaattttacattttcctgatattcaactgtatattgggaaagtatttaggctaaaaggtaatatgacattctgcttaatgttttagaaaataaaggtattcgattttcacttatggtgtttttatgattttagacttactcatcacgtgtttggtcatggtagtggtcatggtagtagactaatgatatagctgctgttctagaaatttaaaatattatttttgtctcattcttcaagtattatttaaaattatttgtgcagtaataatttatataacattcatccaccaattccatgaagtaaaaataaaacaaccttcatacatgagtcctgaaatgtgaagaatcgttttctgaattcaaatggaatctgtgaataattaggggaagaagctgtctctccactttttaatccatttttttgtctctgcctctctcattttcttttccttcaaaatcagagaagcaaagaattcttttgacacataaatgttttggcaaattgtaaattattgatatgttagtatttttcttattaactacaaaccatattagaaatttagggctaaaaacacaaatgtgatattcttaaataaaacattttgttgttaatttttaaatcaacttttctattctaaaatatgtttcttttgcttatgcctatgtatcttttgttgaatattttatcagaatgctttgtgaatagcaaagttcaagggaaaaggctttttgagggaaaattttaatgcagtatttctcaaaatgtattttacaagatgttagagtagttagcacagatatgaaatgaaaactacatattttcagattataagtgtaggaaacacatggttaaacaaaatatcaagctctaatatgagatgagagatgtcaggagggagatatttcctaaatgtctttggacacaagactctatttctttccttggctcactgcaacctccactttcgggttcaagcaattttcttgcctcagcctcctgagtagctgggactacaggcacaccccaccatgcctggctaatttttgtattttttagtagagattggtttttaccatgttggtcaggctggtctcgaacccctcacctcaggtgatctgcccacctcagcctcccaaagtgccaagatcacagttgtgagccactgtgcctcagcctcacaagactgtttctcatggagctcatgttctgtagaacatgtttgggaactgctggcctactgaatgcccagaaccagggctccaggagagttcaaaccgtaccatcctctagtagtgaaagcttcttgcttagtgtattataggtaccctcagatgttgtatgacttgcagtcgttgtcataaattattaattgcagtagtttataaacagtcaagtatatctgtgcttcttacacacgcactttgtcattggaagcaagcacataagcagttaggcctctctttggctacatacagcctgttagggaaagcagccattgtattttatttatttatttatttatttatttatttatttatttattagacggagtctcactctgtcaccaggctggagtgcagtggcgtgatttcagctcactgcaacctccacctcctgggttcacgtgattctcctgtctcagcctcccgagtagctgggaccacaggcgcacgccatcgtgcccagctaatttttgtatttttagtagagacggggtttcatcatgttggccaggatggtctctatatcttgaccttgtgatccacccacctgggcctcccagagttctgggcttacaggcgtgagccacctcgcccagccagagccattgtattttaaaggagacaattctgttcttccttataacctatcccagttgtggattgaatccctgagccttaggtcacgttgctattgttctgcatcaataagcatattataattgatcaataagtcatctgatttaaaaaaccatgtgtcctagttgtgttctaaagggaaaatatgttagtttgttttttttcttttcttcatcctcattaaaccttgggcatgcattaacaccagagccagttctttggatatcaagactttgacttgtagtggcagggctcatgtttacctataatccttggagatttttgagagatggtgattcactgactagggatgtttcaccaccttcaaaggagcatatatgttttgattcagtgaggtcagcgataccagattttagcaacagaactttcagtcagatgagttggtgactcaccttggcttgtaccttagacatgcgggtataagataaatgctttcttaatgataattcagggcccctaaatcttgtatctgcctgaacttactagccttcttaccactgatattaatttgctgcttctgatggaagttggcctgtattatgttaaaacttagatccttcttagaatgaagtatttccctttataaggctgaaagtgagtgcataaagtctgtgaatgggcattgtgttttgaaagctttctgccaactgcttatctcttgaatatgttacaaactagaattttaaacatgtggctcatccgtgcttctctcccatatacatgtatgtttttgggaggaggagctccatgctcttaagctttgctttctgttggattagcattttaatgcttgaaggcagtaattttaaaaatggttcttggtatggggccacccagtttttaaagcctgagtgtcagtaatgagctgagcagtatttgtgggtggcactaattgaaagagaaaaggtactgagggaaaggaatacaaagttgtggggaggggaaggatgggatgaagaaacagacttcccccagtaattgaacctagtttcatccagcttcagagcacccaagtttaacttgaaaaagctttttggattattttgatttgttaaaccagttgtattctatgctctataataaggaacatatatattttagatttttgtgtacacagataattaacacacttaattatagctctcagtttgagccattcagatgagttactgccaactagaatgatgtgcataaacttagctctgtttatatgtaaactgtacaatattttaacgttaacgtcattgttttccccttctcaaagtacagcatgttttgatctacagagggaatatttttaaaaagtggatgtctaagaatgtaaacactgggaggcgagatgcagctgtttatgatttactttttaatcttctgttctttcgtggcttctaacgtcaaaggacttttatttacctgttatagcatatggcttatgactttataagtatgccttttctggtttttattttggctttctaaaaaaggatggaaggaccgaaggaaagctgttgaataaaaatatccccatgcctaccaggtcatgcagtgtggcaggagagctaaaagggtttctattttatgggatcaataaatgtcaggcctcacgctttaccttttggctgtttgtgtttgtcaaaatattagtcacacccagtttgttgtgtctaccactgtctagactcttctggaaatgagatttcattttagtgtttttataggaggacatataataagagataaaaacgtgcttttataatgacaatctcttttgcaagctgttttctagaagtgaaggtatttctgatatccaagtgcctattaagtgaaatgttgttttagctgatttagtttagatttaacagaatggcatttcagtatgtaatttctcattacctttgtaaacacaaagcttaccctgtttccttttataaaaataactttgtatattccagtggactctatttagatgaaagatttgacagtacttccacccatgctttttatagcattgtctataaatttttggttaatagcatggattttgaatcctaattgtccctttactagtttgagatcttgaggaatttatttactcatcttttctaaacctcggttttcttgtgtttaaaacaggaatgataatgcagtctcaggatcgtggcgagaatgaaatgaaataatgcatattaacgctgttcacgtagtgcctaacgtgtaacaaatgatggctatattgtttttggagattctaaattactgtgtatgtgtttgtgggttgggttagtttactaaccaccccacactcactccaggaatggtttactgaaataaacccaccctcactccaggaatggtttactaaaatatactgggagggaggaggatactattgtgatttgagaaccattgtcatcaatattaaaattgctttattttcttagtagagatatttaatttgtggcattaaaagataggctgaggccaagggtggtggctcgtgcctataatcttggcactttgggaagaggatcacttgagcccaggagtttgagaccagcctagccaacgtgctgagaccccatctctacaaaaaataaaaataattaggcaggcatggtggcatgtgcttgtagtcccagctactcaggaggctgaggtgggaggattgtttgagcccgggaggtttaggctgcagtgagccgtgatcacaccactgcattccagcctgggtgacagagcaagaccctgtcttaatcaatcaatcaatcaatcaatcaatcagtgctgagttttaaacaatatattatcaaaagaaaataacactttcaaaaagttagcaaacccctttagaacactgccaactatgaggatctcgtcacaaagacttcagagtccattatctttgatttggctgaaattacttctccttaatcaagtcatatggaccttagactatatttatgagtacctatgattttcttatagatcctttcttggtatacacagtttttaattgacatttattaattgagtaccagttatatataaaacactgtaatggatcaggtagaaagttagagataagaaacctcttaaacagtttagtaaaggattgtaatcaaatgtaagtttattcacggtctcagaaaattacatttcatggcatatttagaatatggtatgattctactctgcctagacataattttacctttcagctaatgaagtgtaataatgcaggttataaaactttagggtgcttttgaattgcccttttagttaagggcaatccattttaaataatgagtcggtgattaaaattataagtttaaagcaaaacaggaagtacctttatacccagtgataaaacagtggtaatttggcaatattccttattgaaggcctgtcatatctcatgattaatgtaattgtctgggttttaatggcatgattttttgaggttctcttctctgcaaacacttagataaaactgcaaagaggcagagcttcagtgtcaagtcccttccatcccttttcagttcttctttttgccaccccctcggggccattttgttttctggtggcttcttgctactggatagagtgaattgatggtcctgtaatttgttagttgttaggatctgtgccacgtgctttacagttaccatctcattgaatcctcacaacagcacagtgagttaggtaattttatcactgttttaccgtgaaaccgcagctcagtgaggctgatcaagtgcccgaggtcccacgccagtaagtggagctggggccttcctgctgtccagtggtcgcatgggtccagcagtgagtgccttacaggcaggattatatactggataccgttttaaaggttacatactacattctcattgtatcccatatcccttggtaaaatgtattctcactctgtctcaactggttaggaaaacaactctgtgaattacacgatatgtgaattgcactgtccagcagtggtttggaaattagctcttgggaagtatctctggccacctcatcatttcctatcatttcctaaaatctttagtagcctatgcttgcagaccagtggtaaagctgcaccttggggttagagaccagagttaggcctggtgaatgaaattgccatgtaataattaaggcctgttgactgccataaaactttatttactggaaaagcgaatctgtggctgacttcctaataagtagagctgaagtgtgtgctgttgattcagggcctgtttgccttcctataggaattggggaccagtttgctactgtctgctggcctcagtggaagttatcaccacacacagaccatcctttctttttattttttagtcttttctaaattttggtacctttgagtcattatgcctctgtgctccccctgatattagaaaatgtgctgcttcgggatctttctctggaagcatctacggttctgggaatgagctacctgcacaaggaatccttcttgttctttaagattctgaggataaattaatactcagcagaaaatgggagcaagcatgtcttaatatcaatacttttgatatttcaaagttgaagttgttatagaccatgatagtcatttacctgttatatcagttctactcatttatttgggatgagatctgagttggcagttttgtggctttttataactgcaggcctctcaagtaataaagatgtggagttgggagctagtctcaaatttgtgctttgtggtttatttggtaaaacatggctgtagggcagggcgatgtatttcactgagtttggggaatgcctgtttctttttggttctatcacttttgagctaacgtacgtggccctacctcagttcctcctaactgagcctctcaggtgtcagagtcacccgcattcattttgtaaagagatagaaatgtactgggtcacagcttcgatccctcttccctcccctgtgcatctgcctctgtcactgggccctcctttctccttagcctgaacactaagcagggtttaaaaaaaatacccggccgggcgcggtggctcacgcctgtaatgccagcactttgggaggccaaggcgggcagatcacgaggttaggagatcgagaccatcctggctaacacggtgaaaccccgtctctactaaaaatacaaaaaattagctgggcgtcgtggcaggcgcctgtagtcccagctactcgggaggctgaggcaggagaatgccgggaacccgggaggtggagcttgcagtgagccgagattgcgccactgcactccagcctgggcgacaaagcgagactctgtctcaaaaaaaaaaaaaaaaaaaaaaaaaaatacccgtgtggagtcttttaaggaattctaactattgtagttttcccccaatgtcctctttgcagtcatccaaatctgtattgttcaagagccctggcggcagaagtttctcattcttctctagttaactcttctagaaccttacccacctggaaaatttccttcatgttttaattccaaactatttctgcagtcaaagcccattcaccctgcagacatggcttgtggtgtagcctccttattggccctcaactaagccctcttagtattcatttatagaaattaaatagtaggtttcctccttcctttttggttctttactcctttgccactgagtgtggtccttagacccacagcactggggtcacttgtaagctggttagaaaggcagaatcttagaccccaccccaaacctaatgaagcagaatccgcactttaacaaaatccccagcagatcctaagcacatttaagttagagaagtgccactttattctatatccttataatctggatattttctctgtgcttttctttagtatggcttaacagtggacactaaagctagacaaggtcctatattgatgactaggatattaccaagtatagtggaaatattttagcaagtatttatgtacctcaacttcttattaatctaatacccatgatattaaaacattttgaactaaatttgatatgtattcttcctttacaatacgtttgtagtcactgaagacatttttgggtcttttttactgctgtatgtttacccccctcacctgtggaagtccccattttttaatttagtgatttggcagctaagaatcttctttggcccttatgttgaatatcaccttgttttctctcttttgttaggatctttctgtttctctaaatagttatgctattaagattttactgatttgggagtgaggagaacgcttagtctcaccctagtgctactactaaccagttgcatgaactcagacaacacatttaatgattctttttttttttttttttttttgagacagagtttcgctcttgttgcccaggctggaatgcaatggcgtgaccttggctcactgcaacctccgcctcctgggttcaagtgattctcctgcctcagcctcccaagtagcttggattacaggcatgtaccaccacacccagctaattttgtatttttagtagagacaagatttcaccatgttggtcaggctggtcttgaactcctgacctcaggtgatccacccgcctcggcctcccaaaatgctgagattacaggcatgagccacgactctcggccactcatttaatgcttctaagtcaacaataccacacaatcaaggaaaccctcataataccaggcctgagactttttgatggctctgtccatattaattcatgagctttttatatggtgacttggtcacgtggtagatgccacctgtagaaatgagaatagggcagttaaactctggaataactcatccaggtgcatctttcggatagtcattggaccatcttccttcccactttcatagaactctcaggtgggaaaaatggactaagttgaatttttgttcagttttcattttatttcttggatctatctctggaaaaagtgcaagaaaaccactaaatggttgaaggcagacggaggaggccaccatggagaagggtcccagcttactgacttatggcaaatggttctcaagtcaacttcctattgactttttctaactatgcgtttgagaggtgggaaattagcaaggacttagcaatcctcccacctctgctcaagagtccctgggaaggtctttgtttctactggaaattcccacaaagagaatcccagaagaaatgatgtggggcaagtcagtggctgtgtttaggggccctggtgagtattgctgctggttgggagtgaagagaattcaggaagaaagaaaactatctctaaagggtaaggctttccaaggacgtttgcctggccacaactcttgcttacattgttacagaaggaaagcgtggagaaaccaaatgaacaggtaggccatggcccgcttgtgacatgtaataatttaatggggaaaaaaagcttcaggcagtttttgaggagaataagcagatttcaccataatgctgttaattaagtgttaattatagcctgttgatgtttgatagtaaggtgaaattttgtggctcccttttattttgaaagcattttgtcagcgtctcaggctatggtctagaaagaatagaagctgttgttttcttggtgtactctgggacctgcagcagctccttttgctatatttaaggaggatctgttcttcttaccactgcctcagggttcaatctgaaaaccctggtatttaaccacctggaaatcaacttgttctgttcattgtctaatttttagaatctggaaccctgtgtactcacggatgatgatatatgtgccccgagcatcccccctttgctgttttttgtcaatattaagttttgggaaagcagacctaaaagtgtcttcctgagaagacattttaaacacagaaacagcaactatgatttgtatctcagtcttgcatttgactactgggttttgttttgtttgtttgttttttgatcataaattatcttccgaggtgtggatatttatcttataaagtagggaaaacctctatgaaacagtgttctgatttaggaatagcctcttagagaataaatttagtggatttattttttaaagtgaatttattttttaaagtctactaattctggaacagaaggaatctaatatttaacattttggtttggttttttttttttttttttttttgagacagagtctcgctctgtttcccaggctggagttcagtggctagatctcagcttgctgcaacctccacctcctgggttcaagtgattcttgtgcctcagcctcctgagttgctgggattacagatgtgcaccaccatgcctgacaaatttttgtatttttagtagatatggggtttcatcatttggccaagctggtcttgaactcctgaggcctcatgtgatctgccctccttggcctctcaaagtgctggtattacaggtgtgagccaccatgcctggcccttgaggatttttttttttttttggactctcagagatttgagggcaatgagcgtgatgaatgggtcacgtaagtaatgtgtctccttgttcactgcagccttatctcattatctccctgagctttgcaaatgattgtgaaaccaggtattttctccattttattaaactgttaatttgttgcagtagactctccactgtgttgtaaggtgtctagtagtattccaggcccttacccattagaagccagtagcatctctcctccccaacccctttcctggttgtgacaagcagaaatacctgcagacattgccagatgttccctgtggggcaaagttttttcacccacacaaattgagaaccattaccctagagatttagtgaaatgcttggagactggagggtgtctgcaaagagaaattggttgagcctcatgagcgtgtttctgccaaaggccagatggatggcttctgtctggcccttccatgggtctgaaggtgaccccatttatttcccttgggactgtagtcccctcagagtctctgtcttagtttgggctgttattacaaaattgagttgatggtggcttaaacaacacacatttatttctcacagttctggaggcgggtaagtccaagaacaaggcaccacagaccctggtttggtgtgccctcttcctggtttacgatggccgtcttcttattgtagcctcctgtggtagagagcagaaagcaagctctcatgtttcatcataagggcacttatcccacccatgagggctccaccctcatgacttaattacctaccaaaggcaccacctcctaataccatcatgttgagggttaggatctcaacatataaattgcaaggaaagacatgtttcagtccataacagtcactataaatacttcttaatggcggttccttagctaaaagttgtcactacctgtttattaagaatggggcacaactgtccatggggtgcttttagctcagccagacaagcagctcaaccctgcaataatgtgatatgcagtttcgtttaagaatgctgttagggctgggcatgatggctcacacctgcaatcccagcactttgggaggcagaggcaggtggatcacctgaggtcaggagttcgagaccaacctacccaacatggtgaaaccccgtctctactaaaagtacaaaaattagccaggcatggtggtgcgtgcctgtagtcccagctacttgggaggctgaggcaggagaatcgctccaacctgggaggcagaagttgcagtaagctgagatcaagccactgcagcccagcctgggtgacagagcaagactctgtctcaaaaaaaaaaaaaaaaaaaaaagaatgctgctaggaaacttttaagcaagtggctttttccacattaaaaagaaagaggctgaaatgtcagataatggagaaaatagagaggggcaggagcaaagtggaagtaagacttgaaagatgaaagcaaaagaacaggagctttggggtcagtaggtgaaaggtcgacccctcattgtcaactggaaaaattttgcctctttacacaaggcagtcagttagaaatttgcaccattgtctgcctcagtgaccttagagctgcaagcagtggatgcattatcaattattttagattaactttctgagatttccctccctcctcttccagctgccaacaattagatgtgcatctggcagcaatttcaatttttcatcaagttactcaagcagcattgactggctagatcacactcctgttcagttccttcagatgagagattggggaaaagaatttggaaacaaaagccacccaattccctgcccccacccccaacaatcataaacatgctttagaacctagaaataatgcataagaatctcactgaacacccatttaagcatattcatgtgatttctttgtaaatactttcagtagtattagaagtctttcattagcagacttagaaagagtggggggcttcaagcttctgatttttttcaagcaataaaagtggcctttctgatgtttctgtagatagcattcatttgagatcttcccctttgtacgtgaatgctactgtctcaatattgaatttgtactctttcctgtgtaggtagacaggtccttgtataacgttgtattacatatcatatctttagccttactactactgctacttttactttttctttttgttctggcattttccccttcctcctttctgaaataactttgtcctctcttcgcaagatgcatcctcattttggcttctgattcagtccttgcctggcatttggttggtggattcatccttgcttgctagttccaccacagtgtttttggctggtgtgttttcaggtatcaggaaaagatgtgggatccaagggtttctagttcttcataacagtagttacactaagagctaatgattgagggcttattatgtgtcaggcacaatgataagaaaatgtcatgtattatctcatttaatctcaacgagaaccctgtgaaatgggcaatgctctcctgtgttacagacgaaaacatttgggattttggagggtgagcaacttgcctgaaatcacagagaaaagaacactgagagatgggataatggaacttgtcttagtttcctttcaaattttaattcagaaataagttttgacttaaacaaaattatcagtctttaaaaagcatgacagccatgtaatagttccatcttcattctgaaaataaccttttttggggttgaattccctaaagtacattttttaattcaaaatcgcatacaggttactcacttgtcactcagaaagaggcaactcaagggaaacacacatttattgcattattactttactgtaagcaacagttaatagctttctctttaacatgagctaattaatatggttcctgcctgtgtatggccttctgaaatctaagatgaatggtatacttttccttgctccttttacattgacttttgttgaagaattactatcatagcccagaaatctttatgacttgcatttccataacagatattcttcaggtaaagcaaatgagaactgtgggtcaaatacatttgaaatatgctgccatatacttgtattataatcagtttcagctggtttcagagagggagtgtttcttcaatagttagaccactttgtttttttttttaaagaacagttcgcttcaaagaatcccagatcaaattcttctcaacgttttccccctgatattctcctcaatgcagaaaggaaaacaaaggctaaaccttttttgcttctgtaagatgatggcttcctggagacgttccttagatcaggggtctccaacctttttggcaccagtgacaggtttcatggaagacaatttttccatggctgggggtgaggggatgaatggtttcatcaggcattattttctcataaagagcatgtgcaacatagatcccttgcatacacggttcatgatagggttcacactcctgtgagaatctaatgccgctgctgatctgacaggaagccgagttcaggtgcttatgctcatccaccattcacctcttgctgtggagcccggttcctaacaggccatggatctctactggtccacagcctgggaattgaggacccctgccttagatgtatgttgtagggaaaatcttctactgaggttgagcttgcccctattagaaactattgggagtggcattgtcctctgttaggcctgtttaaggatcagaaaaacctatgggaagatcatggccccacagctgaggtacctcatggttgttttggaagatgcttgttcaattcagtagatttttcttacatgaccaagttcttccataaagtgaaccacaacccatattatcggggactctagctaaaacttgcggtgagtaggaaatagattaaacacaggttttcccacttctccagctgccaaaagtgatgtcagtggtgttaatgattcttacctcagtccgctgcagaccagggttgtctatgcaaatgcttgtttggtgcctgattcctgggctattatggaaaaactgatgatgcttgagaaacaattgggtagtcagacagttactcaaatgtaaaatcagacgcttgctttcttgaagcaatttgactccagggagagggcaaagaatgagaaatctattagtttttaacaaaaaaagcaaaggcagtgaaaataggctctgcctgattcccttttgtctaattatagaaacagttttgcacacaattttcaccatccatacactaaatgaagttttgattttaatgcaagtctactggtttgtatcaaagccagacctataaaacctgtatcctgtaatctgaccattacaaacaaaaccccaaacccaaaagtgatgtgaaattacaatagaaacctcagaactgaaatgtaatttctgtgagggaaaggatgctgcagaaatagtgcccatgaaagcagaagaaagacattcgtatgacattctcacttagtagggaatattctgtcatattaccttcatgtcttttcgtaacaggtttattttggttgagctctgttaaaattaaagcttcctggctgagcacgatggcccacacctgtaatcccagcactttgagaggccgaggcgggtggatcacctgaggttgggagttcgagaccagcctggccaacacggtgaaaccccgtctttgctaaagatacaaaaattagccaagtgtggtggtgtgcacctgtaatcccagctacttgggaggctgaagcaggagacttgcttgaacccaggaggggcaggttgcagtgagctgaaatggcaccactgcactcctgcctgggtgacagagtgagactctgtctccaaaaaaaaaaaattaaatcttcctgcctgagagtacgtgtggtctgacttgaaatgaagagggactttttttttttgtttttttttcctaagtccttttaccttgaatctgtcatgtacataggacaaactatagtattggtaaaagggagattggaaacattttgatttgcaattgaggggaggagctgttatggtcttgacctcattttctttatcagcatgcttcctgttaataaaaagaatgggaaataacagaagtggatattctttggcttaaaagatgtattaatatttattcagatttccttaatatatcactgacagaatacttttaattactgagaactaaatgttgttttggtctgccttctccacaaattcctaaccatcctgaaaagtttctggaatctccttctgcctttggtagctggggaaggagaaattcacgagactgacagaattcagcccagtagcctctgccagagctgacaggcttgatggtcgcctttcggtcttcttttttttttttttcataatgcgtgtgcctttcttcattggtggtctcctgaagtcaccagccctgccagaagctctttcactgggacaaaaggggaactggagcgagatggcctctcatatgttggcaactctccctgaattttcttccttggcaaccctgcgcactggaagatctggccagcaaccttgttattttcaccagccctctcccatgtgacttgcaccaggcaaaagtgctatttaagcagctccattaaagcactggcttggctggttggcttaccctttgccatttgagaccacaaaaccaagttctttccagctcaatcctggcctgttttaaaagaagttggtttcctttctttagctaaaatggctttctcctttcaacatccaagtagcaaacatgttggtcttacctctaactttagctcaatcttcacttgatgtgtgtgattatgatctgaaggccttagagttgagaattgagaattcactggttagttttctccttttccaagcttcagcttgcccccatacttcccagctgtcccttgtaaagaacggggagattatcccatgtcccagactttagaggctctctggatttagctcttctttttgtatcagcaatatgaccatagttaatagcgctggaccaggagaatgcagcttcctccttctgtgctactaactcaaatgctagaaccaaggctttaagctgggaacttcctttaataagcgtttcacagtctatccataggtcagtggtcatttttattcatctgagattttatagtgggattttatggaggtatgaattttaatgaacaacacccatctattaccagaactataaaggtatttgagactgatgataatatgtgtgtgtgtgttatgtgtgtgtgtgtgtgtgtgtgtgtgtgtgtgtgtgtgtgtgtgtttactgggctcatttgccagattcaggtatgctgaatgtgtgtgttgtaaggtgctttattaataagcattctagaagacatgatttgcttccagttagtggtactgtaaattaagtgtatcagcagtgaggtaactgaagaattgtggtaggagggaggggtatgcagtttaatgtaattgtgtgaaataggaaatcaacagacgtgggaagacagaatagagagaggttacaggcatcattgtcagaatcttgcaaagtacagagctacccactgacccctctgctctcatgaagggaatcttttctaacctgagaggaatccttctgttctcctggctcttccaaatattttgcctgtgcccttcctttaaatactgaggcttttggaaactaaagccagggagccagaagattttcctactttcaaattcctactctccccatattatacaatgcgttgggatgatggcaaagggatggaataccaggatgctttaaaaagttgggtaacatttcaaaaatttttctcatcatggatttttaagaatgggaaagatctaagtatgattaaaacagtattttcctttcctacttagactttttgaggggacattaaatgcagcattttaaaagttcaaatcctttaagtagattgtgaaattacaaccacagctgagtagtggtttttctggtgatggggaatataagtcatgtttattccttctttacatcttcctgtattttatacattttctgtattatattcaagatacttttttttttaaaaagcacacagctgtttatgttaactgaaagagaaatatgctgttttgattcatttctttaagtggaggaaattaatttatattaattttctagttccatctacaatataagatttcaaacaatgacctctattgaaaaaaggtcatcactacggtcatttttttaaagcacagttggataaggaagagttactttctaacaatttagtatgtgacagtggccaagcaacttaaaatattttactcttatttccctagtaaaagtagaaacgactagcaatgccccaactagatttttattactatattgcccttgatttaacatattggcaagaagtttcaaaacatataaatacaggatgaaaacatttgtcaattgttctgaccaagaatgcattgctgagtgtacagatctttccatcacacttatactcttgtgctgtttccagctgctttcccagtaaaaacgatcagtaagctgagacaatgtaaaaggaagcaaagtctttatttgtttttcagctattataggcatagtttaagtgggtagaacccagaagatgtaaattcctactagatgcaataatgcaataatccataggtgtcaagtagcattgctcaagtgttgacttatttgataatgctttaaaaattacatttttcattactggcaacaggattaggtgggttttatcttacaagaatatacacgcagaaggacatagtagatactgatgtggtgatgaaattttgtcaaaatgtaatttcctgctactaaatctcgtgacaggtgcattgtatttctgccttcagaagttattccccaatgatgtaaccagacagaatgcattgtaggaatatcaccacttgatatttgcagtgtcttctcttaaggaaatgttttgcctttttgtttccagtttctgcctgttacaaatgaatttttgcatttgtaaaactttgtagcaatatttgctacctctggtctgtcaattgtctcccttcagtcaattgaagtggtgtatatataaagtgtattaaacatatgtacgcctatgcgggcttttcccctgcttattccagtctttatcattgtatttatgcttattgcattgaatgactgactgcaagaccctagtatgggcattgcttttttcttttttaaaaaatatattaagttacgcaaatgtttgccttttttgagtgagttgctttattcaagttcagccttgcttgattgtgagtatgtggagctagggagatacagacagatgaactttagtctcattaagcatatgttgaggtctgtctctaaagtgaggagacttcctttccaacaaactcatcagagcaagtgttgtacacaactctgattttggaacttcggtttcggaactctttggctttagataatacctcgctgggaacaattacccagcttaatcagtcccattattcaccatatttggctctcaaagctttttggctgtctccaaagatcaaacgtgtcctcagagggctaagactggctgctatagagactattcaaaagaatatgcccaaggctgagcaggcattccaaaaatgctgcaaacaatggctgcatgactggaataagtatgcagcccccaagttggctgttgtgaaggacagttctcactgaaggatgtccatgtcattatttggtagctaaactttatgtgcctacacagatacacacaccctgtacaaagacaaacaggtgtgaacttcagactttcccttttgagacaagtgttgatcaggacttaagataaggggctttgaaaagtagtgtgctaagtaagactttggaaggaaggtgtcgatgcacttgatacgtccttttattccctgctctttgaacatacttgtggataatgacagagatcatttccaagtggcccaaagcaacagatttcagcacccagtgaagccacctgtttttccctctcctcacagggccctgggtctctgtccttatgcatccgtgcaggttggtacgtgtgatgataaaagagggtacagtgtgttcctgtactaagctgtttacccaccccttctggagaagagccagatatgaaatgaaaaacataccatatgccctttgctttctcccccattttatgttcggcagtttgtttgtttgtcacaagtcctttaataaagtgtggccttcctgcctaattagaggcccagagctgtgaagctctgttaagcgctaatctagaaattctggtgggaacattcctatatgcattcaggagaatcttgacagtaaataagagatctggagcttgttgtggggagtttcctagcataccaatggcttgtgaagggacgggctttcttttcatttgtggacaccacaattgtagacacacagagtaaatcctgtttctctggcaattaaaggggcaaacttggaatgcttccttttttgtttgtttttatattgtgatcgtcatgccaagtctttattagtgagttaaaaatacagtttgtttacctgtcttttagaggcagagttaatatttaaaaataaatagaaatctcctaaaactagagtcatcatttggtaaactttgacttatcagaaaaccattgcgtaatgaatgatgactgatgccagccatgatcattcccttcaagaggagacagagggaaaaagatatgaggttggtccaaaagtaattgtggtttttgcaatttattttatggcaaaaaccgcaattgcttttgctccaccctaatatatcggtccacacttacgttgcgtgtattttggaagctgtcactatccttgtaggtgatatgcattattactgctacatcttgaccttatgtcaatgtagcatgtccttgttgtctctataattagataaagtcctcttagcttgtcattcaaggttcttcaccatctacctcaagctacatttgtagacttaattccttctatccctccttagatatcttggggtccagtgaagccacatcctctacttgagcctgctcacggctaccatctcaccctgtaggaccttgtcatatgttctcaatgggaagtgtccttttccttttcatttatttaactcctatttattaagtactaccacgtggcaagccttgtgttatcttctgggactgcaacaccaaagcaacatagacacaatcccagtttccacatccccacattattctttttcttccaaaaccaagccaggtgtgtcagtgagatgctccccttacacccctagctgggaggattctttccatcctccatgtgtctagagctattgcccccatgcatgtatcttggcatgtactgatgtctacttcacatgccatgtatttatgaacagaacttgccttcctttctagaattactagaaggcagggcttccaacagaatccagctttctacacttcctagtatttagtgcaaccacgtactcattcaacaagtatttctgatctactctctgctaaataccctttgatgcactctgtagatactgatatttatagataagttttgaatgcatgaaaaacaaggacctgtaaaagactaggtagtgtaatacttgagtaaaagatgctttatgaggttgaaaaggaaccaacccaaatgtccaacaatgatagactggattaagaaaatgtggcacatatacaccatggaatactatgcagccataaaaaatgatgagttcatgtcctttgtagggacatggatgaaattggaaatcatcattctcagtaaactatcacaagaacaaaaaaccaaacagcgcatattctcactcataggtgggaattgaacaatgagatcacatggatgcaggaaggggaacatcacactctggggactgttgtggggtggggggaggggggagggataacactgggagatatacctaatgctagatgacgagttagtgggtgcagcacaccagcatggcacatgtatacgtatgtaactaacctgcacaatgtgcatgtgtaccctaaaacttaaagtataataataaaaaaagtaaaaaaaaaagagtcttcactctgaaggggaatcacggatagtgaccctttaaaatttaccttcttgacttgcaaagaagaaatgctgtgcttctgcctaaataacttatttctattagacgtaaatctgaatctttttgttttcttatttaatgattcagtaggtccgttttgcttgggtctccctttgcatctaaaattctcatgtcaaacaatgtttgtgcacatgaaaaattgatttccgattttgtcatgtgaagctctgcaacttcaaattctaaaatctgcagctgactttcaaccagaaggagatacaacacagactgactacaacccgctcatgtcggatggtcattttacatagcaactaatgatgtatgtttttgcttcaatcacaacaccaaagaattttctatttttcctttgctaaacctctgaaacatccagatcatgttgatttgtttacagattccacattgatgacttttggttagtgatttctttagactcttgcattttgaaataaataaaaagctaaatacagtttgttgatcatatttaggtggacagtactatttgtgcctgtaacttcagtttatgtgacgctgccccttgtaaaagaaaggttctaaagtagtgattgtgcagtttgagatacctgtggtgctgaattctttcctttttcttttcagaatgaagacctaaatgacctcagcaaatcctcttctaactcatgggtacccagactctaaatatttcatgattcacaactaggacctcatatcttcctcatcagtagatggtacgatgcatccatttcagtttgtttactttatccaatcctcaggatttcattgactgaactgcacgttctatattgtgccaagcgaaaaaaaaaaatgcactgtgacaccagaataatgagtctgcataaacttcatcttcaaccttaaggacttagctggccacagtgagctgatgtgcccaccaccgtgtcatgagagaatgggtttactctcaatgcattttcaagatacatttcatctgctgctgaaactgtgtacgacaaagcatcattgtaaattatttcatacaaaactgttcacgttgggtggagagagtattaaatatttaacataggttttgatttatatgtgtaattttttaaatgaaaatgtaacttttcttacagcacatcttttttttggatgtgggatggaggtatacaatgttctgttgtaaagagtggagcaaatgcttaaaacaaggcttaaaagagtagaatagggtatgatccttgttttaagattgtaattcagaaaacataatataagaatcatagtgccatagatggttctcaattgtatagttatatttgctgatactatctcttgtcatataaacctgatgttgagctgagttccttataagaattaatcttaattttgtattttttcctgtaagacaataggccatgttaattaaactgaagaaggatatatttggctgggtgttttcaaatgtcagcttaaaattggtaattgaatggaagcaaaattataagaagaggaaattaaagtcttccattgcatgtattgtaaacagaaggagatgggtgattccttcaattcaaaagctctctttggaatgaacaatgtgggcgtttgtaaattctggaaatgtctttctattcataataaactagatactgttgatcttttcttctgtcccctccccccaccacttctgtaagtttcctgctctattcccaccatttttttctgtgcacacattatgatatatttcatttcctgcattgtcttgagaaagatggtaaggcaagtgagctgttgctaaccagaaattaaaattccagtaagtgtttttcattatgaccagggctatgtgtcaccttccctaagactcttaccttatctcatattttttgagaacttccagtgttacattatttaactgaatgtaattggcccatttgccttggtgggtgctggcctattagtgattagttaacaaaacacagcgtacagagagcacagaaaagcttaatgacctgctactgaaacacctagccagcagtgaaaatgttaattcttttcttgtttggaaagtatacacgtcttggaattttttccacgtgaaaaacaaatggcaatgaatgcatttaaagatattgccgacagatttttaaatctttttaccaggaaacttcctaaaggttaaatgaattaatgcaaatatcaggctccctctgagtctgtgggagcctctatctctctatcaggaattcgcatccctactattgggaggagcaacattttatttctctgaacgcctaagctccctgggtgggagtggggactacaaggtaggggccagggttggagggcattgtagtggctgctgcctcctgatgaactgtttggggaccccagctctactcaaaagggagcggagataaatggaacccctcacactgctgaggcccgtgttactgttcattcagccaggtggcatgtacctcacagactgttgtgcagtgtccgttattgcagattttaatcatttgcatgctcatcaatttctaagataaatagggtctagagtcataagaatccattgttttcaaggaacttgcagaattacatcatttcctattagtagagagcactacccattttgaaaatctgatatgaaagttgttttttactcttgtaaaaaaagactttcttagtcaaactaacttttcatattttcaagcattctgattcatactcttgctagtggaagaagagagcaagctgccctgctcttttcctttgaggactgaaatagttaaagagaaatcaatgaacaaagtcactcccaaccattttcctgtaaagctggttattatttctcaaggaacctacactttgaatatgtgttaccgagatacctctacatgtggaattatcaacatgttttgaatgagagcagaaatgaacagactggaaaaatctatctcttggtttctatttctctgactttttgagtcgaaaagcataaaggtagaaattcttatttaagctgcttctagtggtgcctgagctggttttgatggtggcatcaaactaccgatttaaaactggaagttgctggtactcaaaccaaaagttcatactctggcgacacgaagggtttcctttgagcaacgtcagctgctgagtccttgtgttcagttcccattgaggagagttggcttttatccatttcaaagcatttgtaggccagccaagggctttcattattgaggcttctagtggcctctggttaacctagaagttagtgggtttttcttgatgacaccaacctctcacagcgtttttccttagagacttaagcagagttttaaaatcctcttttgcgaaaagaacaaatatgttttatgactttgatgatatcttcattctgggcaaaagaatggccctagaaccagctagaagtgaagagaatccattaatgatcaaccacctgagtcaataatgagaaatcagtactgatgttacatttgtggctatttcttgctgactttcaaaggtcaaggactcttgactaatccagtgactgcaaaaatggatctactaaaagtcatctagccagaagtagagatttttaacctttctttccctggcttttgtcttctagctatcatttaaatttgagacatttgaagtattaagaaacaatttttctgtatggtaagaaacagtattttacaatactgaagccctgttttattcaatcttgcatcttgaatacaatataccacaaagtcggaaactttatatttatttactgcaggtggttaaaaaaaggggggaaagggtttcaccatccactgacaacgagagccatgacaaatagtatccatgtgcagtcttccaactgctggtgacaatgaccccatatttggtctcatgctgcttttgcagagcactctgtaggttagtccatcacacaaggaggccctgaatccagacactgtgaattaagaccttggcggggagagatgtgacccttttggtaggaatgggaagaagaatgggtggaagccaatatgaaatttcttctttgcaatgacttgacaggggagttaatgttcctaggatgccatgaatgatgaatgttagttggaggtaatgctgtatatgtgtgtgtgtgtgtgtgtgtgtgtttgtgtgtg

SEQ ID NO: 183 - DNA, 30146 bp, Human; identical to SEQ ID NO: 130

SEQ ID NO: 184 - DNA, 601 bp, Human
ccctggcccctcagagacccccgcagctcccatactggaccctgagccacagggtgggggcagcaggcagccgacaggcatggccgctttggggagagccactgcatgctgggcctggccggcgttggcacctgtgggcacccagagagcgtggagagagctgggaggggctcacaacagtgccgggaagtggggcttggcccagggcccccaagacacacagacggcacagcagggctggttcaagggctttattccatctctctcggtgcaggaggcggcgggtggggggctgcctgcrggctgcgtctagttgcagtagttctccagctggtagagggagcagatgctggtacagcattgttccacaatgccacgcttctgcagggacccctccagggccaagggctgcaggctgcctgcaccagggcccccgcccagctccacctgccccactgccaggacgtgccgcgcagagcaggttccggaacagcggcgaggcagagggacacaggaggacacagtcagggagacacagtgcccgcctgcccgccagccctaggtcgcactcccacccatctccagccgggctggacccagg

SEQ ID NO: 185 - DNA, 601 bp, Human
gtggccccaccacccctggcccctcagagacccccgcagctcccatactggaccctgagccacagggtgggggcagcaggcagccgacaggcatggccgctttggggagagccactgcatgctgggcctggccggcgttggcacctgtgggcacccagagagcgtggagagagctgggaggggctcacaacagtgccgggaagtggggcttggcccagggcccccaagacacacagacggcacagcagggctggttcaagggctttattccatctctctcggtgcaggaggcggcgggtgkggggctgcctgcgggctgcgtctagttgcagtagttctccagctggtagagggagcagatgctggtacagcattgttccacaatgccacgcttctgcagggacccctccagggccaagggctgcaggctgcctgcaccagggcccccgcccagctccacctgccccactgccaggacgtgccgcgcagagcaggttccggaacagcggcgaggcagagggacacaggaggacacagtcagggagacacagtgcccgcctgcccgccagccctaggtcgcactcccacccatctccagccg

SEQ ID NO: 186 - DNA, 601 bp, Human
tcatctggataatggggatatcacacactattcacaaggttgttatgaggcctaaattagctaaagcaattgaatcctccttaccccctgcatggagctctctggagacttccacgtctcctggtcattgtgggtgtcttatggtagtcttgggcagttagggagaagttaggtgtctggaagcaaagatggctcagaactagatagagtcttgggcattttatagataaaaactcttgtctcctttaaaaataataaaaaaaaattagctgggcatattagccactcagcaagactgcaygtgatagatcccgagtgccccaccttgggtggtgtaatacacgatatcacgggagccccgggtagtaaccacggaggtgtcagcctcagtgctgtgggcagatggatggggagagcctcccggaactggagtcactggagcagggttggggggcctcactgagggtacggccttgatctctaaggaggagggactgcctggaaaagctgactgggagggaggactcggctgggggtagaagggactagggaaggctgggggtgggggtgcttatggaggacctcagatgcctggggaaca

SEQ ID NO: 187 - DNA, 601 bp, Human
ggtacggccttgatctctaaggaggagggactgcctggaaaagctgactgggagggaggactcggctgggggtagaagggactagggaaggctgggggtgggggtgcttatggaggacctcagatgcctggggaacagactccactaaataaaacatatgaaaccatggctggttcttcagcagaggccatgtagagaaaggaatgacctaggaaagttggcctggaagtggagggaaggatggtgtgggaaaagcaggaatctcggagaccagcttagaggcttggcagtcacctgggtrcaggatacaagggcctgagccaaagtggtgagggagggtggaaggaggcagcccagagaatgaccctccatgcccacggggaaggcagagggctctgagagcgattcctcccacatgctgagcacttgttctccctcttcctcctgcatagcagtcagtctcctccaaacagaaagtcaccggtttggacttcattcctgggctccaccccatcctgaccttatccaagatggaccagacactggcagtctaccaacagatcctcaccagtatgccttccagaaacgtgatccaaatatc

SEQ ID NO: 188 - DNA, 601 bp, Human
tttaaaaataagaaaatacataagaccataacagccaacaggtggcaggaccaggactatagcccaggtcctctgatacccagagcattacgtgagccaggtaatgagggactggaaccagggagaccgagcgctttctggaaaagaggagtttcgaggtagagtttgaaggaggtgagggatgtgaattgcctgcagagagaagcctgttttgttggaaggtttggtgtgtggagatgcagaggtaaaagtgtgagcagtgagttacagcgagaggcagagaaagaagagacaggagggmaagggccatgctgaagggaccttgaagggtaaagaagtttgatattaaaggagttaagagtagcaagttctagagaagaggctggtgctgtggccagggtgagagctgctctggaaaatgtgacccagatcctcacaaccacctaatcaggctgaggtgtcttaagccttttgctcacaaaacctggcacaatggctaattcccagagtgtgaaacttcctaagtataaatggttgtctgtttttgtaacttaaaaaaaaaaaaaaaagtttggccgggtgcggtggctcacgcctgtaa

SEQ ID NO: 189 - DNA, 601 bp, Human
agagaacaacccttctacctcttttgtctctcctgcattgacgtttttgaagattcccgatgagttttcatgattaaatttaggtcaatctgcccccttttttttttttttttttttggttaggaggggacatatttctttagtaatatggttatgcacaattacttgaaaaaacttatgcagactagtcagttaacagagcaaaaatccttaaaaccccaattactgaataagaaacagttcttcaattggcaaagtaaagagaattaattttgatctgtggtagctacacccaacctcycccaaatcctctgtatgacttgactgtattcccctaactatctcctgaaaaccagacttgaaatgaatataatgctgctttaccttatcttctgtcattgtactagttgggagtcctgtcaattccaggtcttgtgtgagtgtggcacatgcacctgactagctcctgcctgtttattcgcagctctgcctaggcctagttatgcattgcaggaggaggagcaaggagagggaggagttgggctacccagacctgagagtccaagtctaatcttctcagcggcagctgaatattgatggg

SEQ ID NO: 190 - DNA, 601 bp, Human
taattagataccattattatatccaagagtgtgaaattgatacagtaatattatttaagatgcagcccatatttaaaatttcccaacgtctccatagttcccttattgctatttttttcttccttccacaatctaaatcatttgttgcatttggttgtcagtttgtcttaatcccttttaatctagagaacaacccttctacctcttttgtctctcctgcattgacgtttttgaagattcccgatgagttttcatgattaaatttaggtcaatctgcccccttttttttttttttttttttggttaggaggggacatatttctttagtaatatggttatgcacaattacttgaaaaaacttatgcagactagtcagttaacagagcaaaaatccttaaaaccccaattactgaataagaaacagttcttcaattggcaaagtaaagagaattaattttgatctgtggtagctacacccaacctcccccaaatcctctgtatgacttgactgtattcccctaactatctcctgaaaaccagacttgaaatgaatataatgctgctttaccttatcttctgtcattgtactagttgggagtcc

SEQ ID NO: 191 - DNA, 601 bp, Human
tgtgtgttgttttggctgaaccatttacaaataagctgtagatatttgtgtcatttcacccctaaatactttagcatgtacaaagaacaaagacatcctcctacataattagataccattattatatccaagagtgtgaaattgatacagtaatattatttaagatgcagcccatatttaaaatttcccaacgtctccatagttcccttattgctatttttttcttccttccacaatctaaatcatttgttgcatttggttgtcagtttgtcttaatcccttttaatctagagaacaaccsttctacctcttttgtctctcctgcattgacgtttttgaagattcccgatgagttttcatgattaaatttaggtcaatctgcccccttttttttttttttttttttggttaggaggggacatatttctttagtaatatggttatgcacaattacttgaaaaaacttatgcagactagtcagttaacagagcaaaaatccttaaaaccccaattactgaataagaaacagttcttcaattggcaaagtaaagagaattaattttgatctgtggtagctacacccaacctcccccaaatcctc

SEQ ID NO: 192 - DNA, 601 bp, Human
cagtgcagctaaccatgccatctaatgacatgaaggaatgttcagcagagtaagttgcaccagatgagaacttaaaggtgagaccctacagggcacagattgatcaacttatatgattgtgtgtacaggggtgggtgagtttagaaaccacgtataagggagcaaggacactatatcctttatatttttaagtttttttttaaagtatcatatctagagagaagttgaaacagtagtgaagtgatcattccataaccttcgcctttattcaccactggttaacattcaccaatttgttgawctctcgctctgtagtgtttgtgtgtgtgtgttgttttggctgaaccatttacaaataagctgtagatatttgtgtcatttcacccctaaatactttagcatgtacaaagaacaaagacatcctcctacataattagataccattattatatccaagagtgtgaaattgatacagtaatattatttaagatgcagcccatatttaaaatttcccaacgtctccatagttcccttattgctatttttttcttccttccacaatctaaatcatttgttgcatttggttgtcagtttgtcttaa

SEQ ID NO: 193 - DNA, 601 bp, Human
ttgaatgaatcttgaacatctgcgatgtgccagacactatgttaagcacattaccttcctttttgcagtagctttcaaactttagttatttgattactaccttcatgaattttgccaaatctacataccatctatgtagttgttaacttaatgtttgtctttatattgaccttaaagttctaactactttagctttatcctgggctataatactcatgaaatcatgatgtgctaattattctttaaatacatactatataaatgctatataaatagcattttatatttaactttaaatatmaaacatataaatggtgcttatataatatgtatttaaagtgtttatacattataatataatttatcttttataatttataaatactatttaaatatgtatttaacactattaataattatataactattaacattaaaattgttgtctaagcctctctaatataatctcatttaattactccctaactctaaagtactagtataatccctgaatatcccatattatatcactgagcccaagtttctttgcctataaagggtatattgtatcctaatatgtttttgttttctcacaatagag

SEQ ID NO: 194 - DNA, 601 bp, Human
atcctgggagcccttgaaattatttagtccagtggttctaaaaccagaccctacttggagagcctgttacacatgtagcttcttggagacagccccagatcttctactggattagaatctctggggtggggatagggaatctgtaggtttacaaagcttccacccctttcactaatatagggggtatctgtcagactttccctcctaacacttctttctctgaaagaaaggacttcaaagttgacccaaaagacatggttatatgatacatatatattgcccaaaagaataatatatatgwgatatataatattgcataatatgtttattagatataaattggccaggcatagtggctcacacctgtaatcccaccactttgagggactgaggtgggcagatggcttgagcctaagagttcgagaccagcctgggtagcatagcaagaccttgtctctacaaaaaaatacaaagattagcagggcatggtggtgtatgcctgtagtcccagctactcaggaggctgaggtgggaggattgcttgagcccaggaggttgctgctgcagtgagctatgattgcaccaccatactccagcctgg

SEQ ID NO: 195 - DNA, 601 bp, Human
tgaggttggagaaggagagtgaaggaaattttttcttgtattcatatgattagacatttcataaggaagatatttcatgtacatttacataaatttttaaaaagcttgggatatagtaggaactttgttgtgtaaatgaatgagtcacatcaacatggattccagttctcactctcttagtaggtatgtgacccaagccacttcccttataggagcagtttttctctaaattgtggggtgatagtaaatctccctaccctggtgtaaagccccagtataaagaatagcaaattagccagagcccttcattaccctgaaaagctagagatcagaaatttcacaaagtattgtcacagaaccatcctgggagcccttgaaattatttagtccagtggttctaaaaccagaccctacttggagagcctgttacacatgtagcttcttggagacagccccagatcttctactggattagaatctctggggtggggatagggaatctgtaggtttacaaagcttccacccctttcactaatatagggggtatctgtcagactttccctcctaacacttctttctctgaaagaaaggacttcaaagt

SEQ ID NO: 196 - DNA, 601 bp, Human
gggggcgagacacagggcagggaaacaccaggcaattttagtttcccatctttctgtcaggctgcagcttaaacttcttacaggctccacaggctggttctttcccctcaatatcgatttgcagtatgccctgtgctccaggctggcaggtgttgttcatacaagaatgtgagccattcatcatttcccctatgctgctaaaactcaaagaagtttgggacagcttcttccaggggaggaaacaaacattcttttccatatatgtgtatgagaatagcatacctctcctgactattcaccrgataccagaatagggatgcataaaatatatgagaaaaatgattgaaattacttgattaaaaaaatccacccaaatagtcctcatgcagaaaatccaaactttgttttatatatatatatttgttgatatgtgtgtgtgtgtgtgtgtatatatatatgtgtgtgtgtgtatatatatatatatatatatatatatatacgtatgtatatatattcagaatcaggactgagaactagaatagctgctgacggaagggagccgccaagatagagccattatatcattgggagcggtaaaata

SEQ ID NO: 197 - DNA, 601 bp, Human
gtgacctgcagggggcgagacacagggcagggaaacaccaggcaattttagtttcccatctttctgtcaggctgcagcttaaacttcttacaggctccacaggctggttctttcccctcaatatcgatttgcagtatgccctgtgctccaggctggcaggtgttgttcatacaagaatgtgagccattcatcatttcccctatgctgctaaaactcaaagaagtttgggacagcttcttccaggggaggaaacaaacattcttttccatatatgtgtatgagaatagcatacctctcctgwctattcaccggataccagaatagggatgcataaaatatatgagaaaaatgattgaaattacttgattaaaaaaatccacccaaatagtcctcatgcagaaaatccaaactttgttttatatatatatatttgttgatatgtgtgtgtgtgtgtgtgtatatatatatgtgtgtgtgtgtatatatatatatatatatatatatatatacgtatgtatatatattcagaatcaggactgagaactagaatagctgctgacggaagggagccgccaagatagagccattatatcattgggag

SEQ ID NO: 198 - DNA, 601 bp, Human
gaaatgggcataataaggttgttgagaggatccagctggggagatcatatgttaaagtacctgatgcaaataagcaggtgctcaaaaaatgtcccctgagtgaaacatatccttattccctggcacttttcattcatgtatggctgagatctctgaatgaatgttgcaataagctctttttttcttttttttttctaaagtatccttcagcacatgatattctgcctggagttttctgtgagctcagcaaacagcagagtcagagattaagaattatttattgcctccttttttttcccctgtgattgttaattagggagtcaaggccaagttatcagctttggaacagtgcacatcgtacctgacaggccaggatggccttgtgtctcccacgtggacaccctttatctctgtgtatgaggaacatatgatatctatcactgacagaacttgccaaaaagagaacttctacatatttcacttgcctgttgaggtgcattgatcacaccaatgtcatatccaaactggaaggaacccagcacagcagtgatgacagtgaaaaccagggtcccagtgacctgcagggggcgagacacagggc

SEQ ID NO: 199 - DNA, 601 bp, Human
gaaggggctctattaatcaagtcatggtgatgttgaatgttaaattgttaaatgatgttaaattccaggaaacctgctaaattggcatgtgttgtcatcacccacacaaaaaagatatgacccttgtctcttgacccccagcactatgccctggatctctcagcctgccacactcctgatgattgtagcacctaatcggagcacgtctttcagcaggaagcagcccttttcaggtgatggattatggtcagcgcatatttcacatatccacaccctgcagtatctttcattttccttgggkctcaatgttctaaaagaagcagaggaaatataatggacttacagaaggcaccgaaaaaatgtttgtaccttcactttatgccacctcttccccaggttcctcttctctgtctttcattaattcacccctctttattgagtaccttctttatgccaactactgtgcttggcaccagtgataggaagaggaacaattcatcagtcttgccctcaatgacctcacagtctgagttagagcagaggggaatgaagtcctggttccccgacttatgggctgtgggagctgagaataacatacctc

SEQ ID NO: 200 - DNA, 601 bp, Human
gcccagctaattttgtatttttagtagagacagggtttctccatgttggtcaggctggtctcgaactcccgacctcaggtgatccgccaacctcagcctcccaaagtgctgggattacaggagtgagccactgcgcccggccagggatggttcaattaatgatgtgataaggtcttccacaaaaagagaaggggctctattaatcaagtcatggtgatgttgaatgttaaattgttaaatgatgttaaattccaggaaacctgctaaattggcatgtgttgtcatcacccacacaaaaaaratatgacccttgtctcttgacccccagcactatgccctggatctctcagcctgccacactcctgatgattgtagcacctaatcggagcacgtctttcagcaggaagcagcccttttcaggtgatggattatggtcagcgcatatttcacatatccacaccctgcagtatctttcattttccttggggctcaatgttctaaaagaagcagaggaaatataatggacttacagaaggcaccgaaaaaatgtttgtaccttcactttatgccacctcttccccaggttcctcttctctgtctt

SEQ ID NO: 201 - DNA, 601 bp, Human
atacattttctactatttgggactaatagggaatggtcaggattgtggaactagaggagcaagaggaagctgcaaacgtgaaactggtgttggatgacctttaactttttaacagaaagtcagaaatctgagtttttatgtaaattttttcgagttttaaatattggcaactattgaaattgaaactattctgcaggctaggccaggcgcggtggctcacacctataatctcagcactttgggaggccgaggtgggcggactgcttgagctcaggagtttgagactaggctgggcaacatrgtgaaaccctgtctctacgaagaatactaaaaattacccaggcatggtggcacatgcctgtagtcccagctacttggagggggctgaagcgggaggattgcttgagcctgcgaggttgaggctgcagtgagtcaagatggagccactgcactccagcctgggtgagaaagtaagaccttgtctcaaaaaatatatatattctgcaggctaaaaagatacattttcatgctagtgttacttctgcacagcaggatttaaattgacttatacatattttaacagaatcataaaagtggatat

SEQ ID NO: 202 - DNA, 601 bp, Human
acatggatagatttgtttacagttggccatatcctataaaagaaaggttataaattacattgccaacaagaaccaggcaggaacaaataaatgaagggaacatgtaatactttgatgactaggggactaaaatacattttctactatttgggactaatagggaatggtcaggattgtggaactagaggagcaagaggaagctgcaaacgtgaaactggtgttggatgacctttaactttttaacagaaagtcagaaatctgagtttttatgtaaattttttcgagttttaaatattggcarctattgaaattgaaactattctgcaggctaggccaggcgcggtggctcacacctataatctcagcactttgggaggccgaggtgggcggactgcttgagctcaggagtttgagactaggctgggcaacatggtgaaaccctgtctctacgaagaatactaaaaattacccaggcatggtggcacatgcctgtagtcccagctacttggagggggctgaagcgggaggattgcttgagcctgcgaggttgaggctgcagtgagtcaagatggagccactgcactccagcctgggtgagaaa

SEQ ID NO: 203 - DNA, 601 bp, Human
agctagaggatcaaagcaattatctagaaatacacacaaaactcatgtttggtataaatgtctgaacaattaaccaaactgtcgcaacagcttttttcattgatttgatctaacactgatatgcctcatagggtcatgagttgaaaaaacaactctaaagctattccacaagaagaaagataatatttttctaaacaagtgttaggaaaatgaaaatatgaaagtttctgtttatgcttatttatgaaatttgcctaccttccaagtgtgtccccaagccacccaccaaagaatgatgcartcattccaccaactgcaaagctggatacagacagggaccagagcatggtgattagttgagcagctgccacagtctcttcctcagcccaaggggttggttttgggttcattgagtatgagattgtgggcagttcatctgtactgttgataacatagttgttgatagcttttcggtcatccagtggaacacccaaaacatgtctatagtgagatattattacctaggagataaagaaaaatagctttactatttcaaacattctatgtatttttgtttttgtctttaaagtgtttgttacgt

SEQ ID NO: 204 - DNA, 601 bp, Human
aactttgataggtgggccttttccatgcaagtatctttaacaccaaccaaacagaattttttttttctggagcataaaactataaagtcacatactgcagtgattgtccaacatccacgtgataggctaaatcatgtcccctggcagcctacagcataatccccagactctgtaaatgttacgtcacatagcaaatgaggttttgcagatgtgattgagaatcttgagatggggagattatcttcaattatctgagtgaatccaatgatgtaatcacaaatgtcctgataagagtaaggtrgaagaggagcaggtgatatgatgacagaagtagagattagaatgttgtgcttcaaagatggaagaaggggccacaagccagagaactatagttggtcactgcaagctggaaaagggcaaggaatgcattcttccctcaaagcctccagaaggaaccagccttattggcattttgactttagctaactaaaactgagtttggaattttgacctccaaaactataagaaaacatatttgtgttgttttaagccactaaattggggataattcattacagcagcaatgtgaaatgagtatagg

SEQ ID NO: 205 - DNA, 601 bp, Human
aatatcagctgcttctctctgattcactttccctatggacaccaccactgtaatgcttcactcggtcatgtctagaatcatacagggctggggaatgtggtctaagagatgggttcagagtgttaaggtcttgtcagatagaagagatggagacatggcagccaggtagtccataagggcagaattaagggtcgtggtatagcagtctcccactgtctgctataccacagcagtaataacaacggctagcatttactggtagcttactgtatgtcagattctatgcggaacgttttacatrtgttctcacaatcaccctataaggtagatattattatccacttcatttaataaatgaagcaactgagagtcagagttaaataatttgtctgtgatcatacaactagaaatgatgtcattgccatggacgagaaccttgatagcatcataattcctacttactggtcccaaacctcccaactcaggatttcaactttatgctattgcctttccctctgtgatgtcaccctagactcaaaaatatccctgagtgctaccacatccgcctttagagttactttcagacaaaggtaggtgtgtg

SEQ ID NO: 206 - DNA, 601 bp, Human
ccactattcagaataaagtttgtgggaggaacctccttcctttattctgaacttttaaatatcagctgcttctctctgattcactttccctatggacaccaccactgtaatgcttcactcggtcatgtctagaatcatacagggctggggaatgtggtctaagagatgggttcagagtgttaaggtcttgtcagatagaagagatggagacatggcagccaggtagtccataagggcagaattaagggtcgtggtatagcagtctcccactgtctgctataccacagcagtaataacaacrgctagcatttactggtagcttactgtatgtcagattctatgcggaacgttttacatatgttctcacaatcaccctataaggtagatattattatccacttcatttaataaatgaagcaactgagagtcagagttaaataatttgtctgtgatcatacaactagaaatgatgtcattgccatggacgagaaccttgatagcatcataattcctacttactggtcccaaacctcccaactcaggatttcaactttatgctattgcctttccctctgtgatgtcaccctagactcaaaaatat

SEQ ID NO: 207 - DNA, 601 bp, Human
agcttcattggcagaagttacagatttagccatttgttttagagagagattgaatgattctccctttcttcagatgtctgctaattagttgcctctgaatgtttgaaaagctgtctccaagaactagcgattcccactattcagaataaagtttgtgggaggaacctccttcctttattctgaacttttaaatatcagctgcttctctctgattcactttccctatggacaccaccactgtaatgcttcactcggtcatgtctagaatcatacagggctggggaatgtggtctaagagatrggttcagagtgttaaggtcttgtcagatagaagagatggagacatggcagccaggtagtccataagggcagaattaagggtcgtggtatagcagtctcccactgtctgctataccacagcagtaataacaacggctagcatttactggtagcttactgtatgtcagattctatgcggaacgttttacatatgttctcacaatcaccctataaggtagatattattatccacttcatttaataaatgaagcaactgagagtcagagttaaataatttgtctgtgatcatacaactagaaat

SEQ ID NO: 208 - DNA, 601 bp, Human
gttttctatttcttgacatctaaatggaataatttaactctagaatagctctaaagttaagacctggcttgccaggtcacctccagtgctatcccaccaacaattccaaggggaaaagtgaggagtgataataatttacctttgaacgaaaaactctatgtctctacaccacctccactaccactggtagaattggcttttctctctgtgctggtctacagtgagaatggacagtcagggagggacgagatggatgaagtggaggaagtacagtaggggatgcaatagtagtagtggtacygtagaggatgaagtagatgggtgcagtaggggataaggatggggagtttttacctgactaataagaatgcccgtgacgatggccagctgatgaaaagtgccaagtgctcccctgagagcggttggagcaatttcaccgatatacataggaaccaggcctgaaattagccctgcatgaaacataaacataaatgttaaagtgcaaccaggactatctcaataataacaatttggtttaagtacagtatatatcttgaatgaaagcccctccctgaattcactggaaggatgaacccttgtt

SEQ ID NO: 209 - DNA, 601 bp, Human
gtcgtaggtgtggggtcccagactccctttgacaccatagggtagaagggaaggatagactcagctgaacaggagttcctgtggcaatcacttacatattagattcccaagtaagatgtttaaaacaaaggaaacccaggcagtcaaacacgaagttttctatttcttgacatctaaatggaataatttaactctagaatagctctaaagttaagacctggcttgccaggtcacctccagtgctatcccaccaacaattccaaggggaaaagtgaggagtgataataatttacctttgaaygaaaaactctatgtctctacaccacctccactaccactggtagaattggcttttctctctgtgctggtctacagtgagaatggacagtcagggagggacgagatggatgaagtggaggaagtacagtaggggatgcaatagtagtagtggtactgtagaggatgaagtagatgggtgcagtaggggataaggatggggagtttttacctgactaataagaatgcccgtgacgatggccagctgatgaaaagtgccaagtgctcccctgagagcggttggagcaatttcaccgatatacat

SEQ ID NO: 210 - DNA, 601 bp, Human
ggtttttttatctcactttaactaaattaggaactatttgttatataaggaattaccctaggtttcattaactccaattggacagtcaggatgagaatcaaccaagcttaggcaaaaatacgtacttgatatctaaagcaacacatagctgtattctccaggcaaccagatagaataatactgtgttaaaatcatccatgactttggacctttgcttgatatttccttcttatattacccagaacttatagaaaggggttttatagatagaacaattactgtgatgagaactgtcttggcrattcctatggcaacagtttatagactaccctctggattgtcgtaggtgtggggtcccagactccctttgacaccatagggtagaagggaaggatagactcagctgaacaggagttcctgtggcaatcacttacatattagattcccaagtaagatgtttaaaacaaaggaaacccaggcagtcaaacacgaagttttctatttcttgacatctaaatggaataatttaactctagaatagctctaaagttaagacctggcttgccaggtcacctccagtgctatcccaccaacaattcca

SEQ ID NO: 211 - DNA, 601 bp, Human
taaaaataaacatcaaggacctcttaaaggaggacggagaccacagtggagtttgtggagtgaggttcaggtctcattttgtttcaatggatgggaattacttcctttgcctcccccaagtgtttgcccatctctcaatcacccacaaagtgtcccatgtggatttggcattggctcactacagcaaatgtccagtttacatttttaacagcaacaaaaggggagaagtggtgtttttttttttttaatctagtttcttaacaaatgcttaattttttcctctagtagtcaattgtcagtrgaaccatcttggtctgcatgatgcaggggtttcagtgtaagacctaaaagctagctagtttaatgctcagtatgtttttcaatcatgtattgtctaccgtccttagtcaacaatatcatgccagtttactctattatttattttgtgtgctatctcctcaaatggagtgaaaatttcttagatggcaggaactgctctttgcacctggctatctggtatacttcatttaaatagataaagggaacccttgactccatttggcttgggctatcagaaatcctaaattcaatactcaactgt

SEQ ID NO: 212 - DNA, 601 bp, Human
tgagatgggagatatgagtttggtctctgagcctcaaagttatacagagtattaataaaaataaacatcaaggacctcttaaaggaggacggagaccacagtggagtttgtggagtgaggttcaggtctcattttgtttcaatggatgggaattacttcctttgcctcccccaagtgtttgcccatctctcaatcacccacaaagtgtcccatgtggatttggcattggctcactacagcaaatgtccagtttacatttttaacagcaacaaaaggggagaagtggtgtttttttttttttaatctagtttcttaacaaatgcttaattttttcctctagtagtcaattgtcagtagaaccatcttggtctgcatgatgcaggggtttcagtgtaagacctaaaagctagctagtttaatgctcagtatgtttttcaatcatgtattgtctaccgtccttagtcaacaatatcatgccagtttactctattatttattttgtgtgctatctcctcaaatggagtgaaaatttcttagatggcaggaactgctctttgcacctggctatctggtatacttcatttaaatagataaagggaac

SEQ ID NO: 213 - DNA, 601 bp, Human
atgcatttataactaggaatagaattgctggaccatggtgtaggcatgtgctcaactttgatagatattgccagatagtttttgaaagaagttatgacaattttacagtctcaccagcatgtataagaggtctagttgctattgcatttaatccagaaaatttcactagtctcagtagacatggagaaattttgttcacaacctttctaatagccttttaaaatttagttatgtttatatatttatgtcttttaggtcattctgctatccatcatcctttgtcattccttccccacctaaygtgtcctattgctggtacctcttcctgcagacaggactgaggtagaggactgtgccaactgtgttcagtgcatagaggcctacagcacgcttcacactatcccaccatttttaggctgcccaacagcctcaggttcaacatttcctagattcctctttaagtcaggcactgggatggaagctgaaacagtaaggttcagagaaattaaattttatgccattgaatatacagacagagctgagatgggagatatgagtttggtctctgagcctcaaagttatacagagtattaataaaaat

SEQ ID NO: 214 - DNA, 601 bp, Human
aactcttttattatgatgttcaaaactggcttggtgccaccacgtcaagctaccaagaaaatagaagcatttctttgtgaataagctcccttactataaactctaaaactgaacatcttgaaaattgagttggcctctgtccctgaggcctggtgtacactcaggatgagtgtgacaaggagtgagacatggtcagtggctggagatgtcttcccaattagaacgctcatctttgccccagggcctcacgcaaatcctgggctcttagttccaatttggtagtcaccgcttctttctcagygtcatcctgcttcctagatccctccattttctttctgctttttttctctcaagattacaggccctcttctaccagcccattagtgtggaagaaaatataggatgtggaacacaattagtgtggagttgggaaagtctctcttcccaaaaacaaactgatgttcttccaatttggtgaaacattaatatattcagtgcatatttctatttgcatatttttatttgaaagtacacacacaatttggtaacattggttaattttggggagagaaactgggtgacggagggactatccttttta

SEQ ID NO: 215 - DNA, 601 bp, Human
ctcagaggcacactcatatcagagttttaaatcacttcagataagatgataagctaagagcacatatttaattattgagaaggaagttggaaaaaacagacttttctcaagttcattaaatttctctctatattttaactcttttattatgatgttcaaaactggcttggtgccaccacgtcaagctaccaagaaaatagaagcatttctttgtgaataagctcccttactataaactctaaaactgaacatcttgaaaattgagttggcctctgtccctgaggcctggtgtacactcagratgagtgtgacaaggagtgagacatggtcagtggctggagatgtcttcccaattagaacgctcatctttgccccagggcctcacgcaaatcctgggctcttagttccaatttggtagtcaccgcttctttctcagtgtcatcctgcttcctagatccctccattttctttctgctttttttctctcaagattacaggccctcttctaccagcccattagtgtggaagaaaatataggatgtggaacacaattagtgtggagttgggaaagtctctcttcccaaaaacaaactgatgttct

SEQ ID NO: 216 - DNA, 601 bp, Human
tgagcaagttggctggctcatcagcctatcagtaaatcaatagcaatccaatgtctttagtatagtgagctctggctctgaagacatcttagaaacatttcacctacagtgaaagcctgtttctcagaggcacactcatatcagagttttaaatcacttcagataagatgataagctaagagcacatatttaattattgagaaggaagttggaaaaaacagacttttctcaagttcattaaatttctctctatattttaactcttttattatgatgttcaaaactggcttggtgccaccaygtcaagctaccaagaaaatagaagcatttctttgtgaataagctcccttactataaactctaaaactgaacatcttgaaaattgagttggcctctgtccctgaggcctggtgtacactcaggatgagtgtgacaaggagtgagacatggtcagtggctggagatgtcttcccaattagaacgctcatctttgccccagggcctcacgcaaatcctgggctcttagttccaatttggtagtcaccgcttctttctcagtgtcatcctgcttcctagatccctccattttctttctgctttt

SEQ ID NO: 217 - DNA, 601 bp, Human
gaaccataatgttaccactactccaggattatcactttgggtacaatattcacagactgtacagctggggtctcttccaatagatgtcctgtacatttaaaatttgaaggttccacatttaaacatgacattaacttattttctaatagttatcctaagttataattacaagggtctgtgcactattgacaccggaaacagtacaactgttcaggtgtcaactattctcatccaattttctcactgcttaataaagtcctattatgaccactcacctagcaacatgtggaatttgataatwgaaccaaaataggcctgcatttttctggtatgcttaattgtatcttgtgctgggagtgaactattcgttttaaaagttagcactttaaagcaaagggttaaaatgctttcttatcttaactgaggagatacgtcattgattcctttagttttgtggacctttgcattaatggttaagttttacaattagccaagaccagagtttgttatactcttgcctgatccttggaatattaccaaggctggtgagtcactctccccctcaccccccacaaaacttcctgtcataatttctcacttt

SEQ ID NO: 218 - DNA, 601 bp, Human
cccaggtggcagagctagtttcagtggacagcgggtaatgatcaaatatctgcttaatttagtcacattggtttgaatagaccattatagagatagaaccataatgttaccactactccaggattatcactttgggtacaatattcacagactgtacagctggggtctcttccaatagatgtcctgtacatttaaaatttgaaggttccacatttaaacatgacattaacttattttctaatagttatcctaagttataattacaagggtctgtgcactattgacaccggaaacagtacarctgttcaggtgtcaactattctcatccaattttctcactgcttaataaagtcctattatgaccactcacctagcaacatgtggaatttgataattgaaccaaaataggcctgcatttttctggtatgcttaattgtatcttgtgctgggagtgaactattcgttttaaaagttagcactttaaagcaaagggttaaaatgctttcttatcttaactgaggagatacgtcattgattcctttagttttgtggacctttgcattaatggttaagttttacaattagccaagaccagagtttg

SEQ ID NO: 219 - DNA, 601 bp, Human
aaaaaatacttttttggtaatatttgatgacatttctgatgagagcacataaaaataaaacaatacttaaagatgtggatataaaatgctcaaggaatcatcatttaaaaacagacggttcccttattgtttctgttcatgtcaaaaagcagggttttttttttacacagtctctgtagctcctaggaatttcatttctacagcagcttttggcctgtgggctgagccactcttcttttggaattctgcagcaatttcctcaaaagactttcctttggtttctggaactttaaaaaatgtraacagggtaaaggccaggagcactccagcaaagaggaaaaacacataaggtccacagaagtcctggatagaaagcaaacacagactttgagttagcagttttttgaccctctcttctgttcagtaaatctgtggaatattaggctgcttaccgcaatgtactggaaacacagagctacaatgaaattgcaggtccaattgctgaatgcagctattgctaaagcagcaggacgtggtccttgactgaaaaactcagccaccatgaaccaggggatcgggcctggcccaatttcaaagaagc

SEQ ID NO: 220 - DNA, 601 bp, Human
aggaagggaacaaacttaacttagaaaagcaagtatctatttggacagctcttaacacttttttctccttgaactgtctaataaaacacaacaacatttttgtggcttgccagataataaatgagatcaaacagaccaagatttcatattgaggagtgctttaggtctcagtgaagtacaggttctgtagattttattgggagaaactgaggactaggccctgcttcacaggcaatgaacagtggggcacacacgagacatgttccctctgggttgggctcccctgacatcaggctatgamgcagacagctgtgcacacactgtactgtttaacacacatgggaagtcattattgcacatgccactcggtcactgtctctattttatgatgagaaccaggagggtgtgagatttgcctgcatcatgggcagctggtttcacagccgggactcttggcttggctctgcagtgctcggctgcactgaaaaaagggccagctatggctctactttccctgtcagcttgtcatctgctgctcttgaccttggtcttgtctttgcagtgtgagacatccatggatggagaggcgggactctgctgg

SEQ ID NO: 221 - DNA, 601 bp, Human
agacagctgtgcacacactgtactgtttaacacacatgggaagtcattattgcacatgccactcggtcactgtctctattttatgatgagaaccaggagggtgtgagatttgcctgcatcatgggcagctggtttcacagccgggactcttggcttggctctgcagtgctcggctgcactgaaaaaagggccagctatggctctactttccctgtcagcttgtcatctgctgctcttgaccttggtcttgtctttgcagtgtgagacatccatggatggagaggcgggactctgctggtgygtctacccttggaatgggaagaggatccctgggtctccagagatcaggggagaccccaactgccagatatattttaatgtacaaaactgaaaccagatgaaataatgttctgtcacgtgaaatatttaagtatatagtatatttatactctagaacatgcacatttatatatatatgtatatgtatatatatatagtaactactttttatactccatacataacttgatatagaaagctgtttatttattcactgtaagtttattttttctacacagtaaaaacttgtactatgttaata

SEQ ID NO: 222 - DNA, 601 bp, Human
ctgtctctattttatgatgagaaccaggagggtgtgagatttgcctgcatcatgggcagctggtttcacagccgggactcttggcttggctctgcagtgctcggctgcactgaaaaaagggccagctatggctctactttccctgtcagcttgtcatctgctgctcttgaccttggtcttgtctttgcagtgtgagacatccatggatggagaggcgggactctgctggtgcgtctacccttggaatgggaagaggatccctgggtctccagagatcaggggagaccccaactgccagatrtattttaatgtacaaaactgaaaccagatgaaataatgttctgtcacgtgaaatatttaagtatatagtatatttatactctagaacatgcacatttatatatatatgtatatgtatatatatatagtaactactttttatactccatacataacttgatatagaaagctgtttatttattcactgtaagtttattttttctacacagtaaaaacttgtactatgttaataacttgtcctatgtcaatttgtatatcatgaaacacttctcatcatattgtatgtaagtaattgcatttc

SEQ ID NO: 223 - DNA, 601 bp, Human
tgttctgtcacgtgaaatatttaagtatatagtatatttatactctagaacatgcacatttatatatatatgtatatgtatatatatatagtaactactttttatactccatacataacttgatatagaaagctgtttatttattcactgtaagtttattttttctacacagtaaaaacttgtactatgttaataacttgtcctatgtcaatttgtatatcatgaaacacttctcatcatattgtatgtaagtaattgcatttctgctcttccaaagctcctgcgtctgtttttaaagagsatggaaaaatactgcctagaaaatgcaaaatgaaataagagagagtagtttttcagctagtttgaaggaggacggttaacttgtatattccaccattcacatttgatgtacatgtgtagggaaagttaaaagtgttgattacataatcaaagctacctgtggtgatgttgccacctgttaaaatgtacactggatatgttgttaaacacgtgtctataatggaaacatttacaataaatattctgcatggaaatactgttatctctgtggatgtttatttagtgatattatctttttgaa

SEQ ID NO: 224 - DNA, 601 bp, Human
acttttctacaagggagccttttctaattgccctagagctgtgctgtttgaaatgctaatccttcctcttccatcccggactgggagtctggggtaacagaagccgaggagggtgaagacccccagatgctaaagtgaggggtgttcaagacttaccaatgggcatgactaagaaaaaaggcagccagcagaggacgaagcagccgaccacgatgcccagcgttttggccgctttcttctcccgggagaacttgaggagcctcactgagaagtgcgtcttggtcttggcgctggccatccygctgcctcctgccggggcgtttttccgatggatgcggagcgtcacttgctccgagtccgacttgtcggtcttgaggccagacttgaggccccggctctccctcttggccaccacgtagacgcggcagtacatgaccaggatgatggccagaggcaggtagaaggagcccagcgctgagaagagcacgtagcccggctcctcgttgatctggcagatggtctcgtcctcgggggccggctgcctccagccgaacaggggtccaatggatatgaccagggagagtgcccagacgcagagcag

SEQ ID NO: 225 - DNA, 601 bp, Human
ggttcttgtcaaggctgggggttgagggccctacacagcagcagacctgcaaaaagcttttacttctcacccgggctgtggtacaggaggattggtctttggacactgtaatcctggcagatccacggggcatggaagagaaaaatttccattcacaaacgccatccgtcttggagatcctgtagaaggtctctcttgatcccacggggatgcgcaccatgtccttgtgttgcccttccacggcctggctgggcgggtgcagggtgtagcccagggcatgtttggaagactgctttctgcrgagacactggattctcaagacattctgaaaggcctttttgaactcttggctggagcatgggtatatgatggggttgatgcagctgtttagatatccgagccaaaatactattttaaaaactgtttcagagggcttgaaatcagggaagaaagaccctggaagaaaacacacagatttatacatattatttgaaagccagcaagccaattggctaggaaaacaatcaaacagacatctttctgtatttttaaacggttaaaatgatcccaaacacatatgagtttctcacatttgactgac

SEQ ID NO: 226 - DNA, 601 bp, Human
gtggactaaatgcctccttcatgattagcaccagggggcctgtctttctgagtctgtcaaaatctattctacaaatataaaaatatcgttagaaaagtaggtgttaattttaaatataatttttgctgcagcttatgaagtacattgaggaagtgtttataaaggggattctttttctagtgtattatttggagacgcagcttctactgtaggcttaccttcaaatcaaagataatacattcttttatagtattagatgtagagcaactttctccctcttataatctgtataaccattagsatactaacaacaagaagaaaattactctgaatactttaaaatgataaataggccaaggacttcaatgagctgtagaggatacatattacatccaaaatcagtctaccacattgtactcacattttgttggcagccttcgagtgtaaaagggcttttactggtgcacacctcgggcccaggggcagtgcctggaaccaagttgaggctcagacactattcagacgtcaccttcctccttggggtggggttaggggagtggtagcttgtccatgaactcagtgtgctatcgtctttgttttg

SEQ ID NO: 227 - DNA, 601 bp, Human
cccagaagagaccattggatcagacgtgtgactcagcagactccagctgtagccaaatccacacatctttcaagtctaaagagttttggttacttgaatttactgagaagactgagcaaagggaagtttagtgatatcacgttaaaattttatgaagtccaaaagaatgctagatttccaaatttacttgtgagagacaaaaggatacaagtgtgtgtcattgtgtacataaagtttcggtctcacccctgtacaatgacctttatttgcaatagatggcattcctggtaagttgcttctragttggatttgtgcaaaggatttcccactgacttagcctatgatctcttcacttctttggttttttgtgtgtttgttttttggttttgttttgagacagggtctcactgtatcacccaggctggagtgcaatggcataatcatagctcactgtaacctggaactcctagtctcaaacaatccttctgctcagcctcccacgttgctgggaccacaggcacacactaccatgtctggataattttaaaaatcttttcacttctgatttttcattgccaagggcttctagtaatggtgcctt

SEQ ID NO: 228 - DNA, 601 bp, Human
gctagaataaatatcgtaaaatggctttgaagttgaaaggaattttggggggggaatccttttatgaagaatttttttttttttttacagtttgagaggaaaaataatgtattttgagaatgtgttttccttaatatttgttaaatgagtagactgtattcttaaggtttagaaaggacagaaacaagtttgtgcttagttcttctgaattcgttgatatcccttgttgctgttcacaatacacccactcccagccctccgtgatggagataactctgttccccacaactagggcttgccsactctcatggtacttctgatgtttaattcttttggctgtgtctgcatttcctcatttacttttaatttgcttatccctagaacataccttttgagtgcctaaacttttttatcttcctgtcctgaagacaaaaatttaatctgtgaattaaacccatggagaagtatcatttatgaagggattggtacatattgatgcatgatgatgaaatgtgtcttctggtttatgtccattgcaggaaatagattggatttaggatgatgggacatctcattagaggggaaatttcctgatcttgac

SEQ ID NO: 229 - DNA, 601 bp, Human
aagttgaaaggaattttggggggggaatccttttatgaagaatttttttttttttttacagtttgagaggaaaaataatgtattttgagaatgtgttttccttaatatttgttaaatgagtagactgtattcttaaggtttagaaaggacagaaacaagtttgtgcttagttcttctgaattcgttgatatcccttgttgctgttcacaatacacccactcccagccctccgtgatggagataactctgttccccacaactagggcttgcccactctcatggtacttctgatgtttaattmttttggctgtgtctgcatttcctcatttacttttaatttgcttatccctagaacataccttttgagtgcctaaacttttttatcttcctgtcctgaagacaaaaatttaatctgtgaattaaacccatggagaagtatcatttatgaagggattggtacatattgatgcatgatgatgaaatgtgtcttctggtttatgtccattgcaggaaatagattggatttaggatgatgggacatctcattagaggggaaatttcctgatcttgactaaggcatgcttcctgccccacgtttaaa

SEQ ID NO: 230 - DNA, 601 bp, Human
aatccttttatgaagaatttttttttttttttacagtttgagaggaaaaataatgtattttgagaatgtgttttccttaatatttgttaaatgagtagactgtattcttaaggtttagaaaggacagaaacaagtttgtgcttagttcttctgaattcgttgatatcccttgttgctgttcacaatacacccactcccagccctccgtgatggagataactctgttccccacaactagggcttgcccactctcatggtacttctgatgtttaattcttttggctgtgtctgcatttcctcrtttacttttaatttgcttatccctagaacataccttttgagtgcctaaacttttttatcttcctgtcctgaagacaaaaatttaatctgtgaattaaacccatggagaagtatcatttatgaagggattggtacatattgatgcatgatgatgaaatgtgtcttctggtttatgtccattgcaggaaatagattggatttaggatgatgggacatctcattagaggggaaatttcctgatcttgactaaggcatgcttcctgccccacgtttaaaattcaggatctcttccttaaaacat

SEQ ID NO: 231 - DNA, 601 bp, Human
gcagctagaagggtaagtgccccaaatttcatgagctgacgttctattacaaaataagcagcgtgcttatgaaactgtgttgctgaggtaagagccctccctgccttgttaaagagaagaaaggaggaagccgcagtattgcctgtgctgctcgagtaggtcttgggtggagtcatggttctccattcttaggaggttgctgtttggaaaacagagatgttatcacccttactggattttgcctcatcagtcaagggttgcgtgtctgactgtgaccagtgagacggcagacgggggtgcrcttagggcttttctgccaagaatgacagcagttggtctggagtgctcacctccctgtgaaatcattgttcgcgcgaccctcatctgcctcaggatgctgtactctactacgcacaactgctccatcttttaagatattggaagtgagagcacgggaggagcatgggcggttcgttttgttagaaagaaacccggattcacgagatggtttttattgattagtttacaggatttgcactattgatagagtttttgccttggcacaggcctgctttgtgataggggttttaaaataaccgtg

SEQ ID NO: 232 - DNA, 601 bp, Human
caaatttcatgagctgacgttctattacaaaataagcagcgtgcttatgaaactgtgttgctgaggtaagagccctccctgccttgttaaagagaagaaaggaggaagccgcagtattgcctgtgctgctcgagtaggtcttgggtggagtcatggttctccattcttaggaggttgctgtttggaaaacagagatgttatcacccttactggattttgcctcatcagtcaagggttgcgtgtctgactgtgaccagtgagacggcagacgggggtgcgcttagggcttttctgccaagartgacagcagttggtctggagtgctcacctccctgtgaaatcattgttcgcgcgaccctcatctgcctcaggatgctgtactctactacgcacaactgctccatcttttaagatattggaagtgagagcacgggaggagcatgggcggttcgttttgttagaaagaaacccggattcacgagatggtttttattgattagtttacaggatttgcactattgatagagtttttgccttggcacaggcctgctttgtgataggggttttaaaataaccgtgggcttttcactggaggataaaa

SEQ ID NO: 233 - DNA, 601 bp, Human
gtacctttgcatatgtacttttctctttaaactctcccttttaaatacgactcttgccaggctttaagtgaatgcttcaaaataaaaggagttatcaattaaagagtgaattccttccaaagagaatttgggaaaataatttaggaaaagaagaggcgagaaggtcatgggaaaggttgtctttgctgatttatctgccccaactggataaagttactgcataagggtttctttacagcctccctgtttttctcagactaactcttggtcagtcttaaattcttaaaattccatcatctgwtagagctaacgagagcgggcagctcttcattccatccttgaaaagcacagtgtcctccccactggggaacaccaatccttaaaaaacttctttctcattgcaaatcgaaggaggctgccgctgcacccagccccagactcctcagtcacttacctggcaagctgaggccctaccagtttaaggtgatgattattgtttcttgtattaaattttaaaatgaatttttctccgctttttttttttctaagtaggtttgtgtttctggaatctcgggtgtctgtgagcatttcttcttcagca

SEQ ID NO: 234 - DNA, 601 bp, Human
tcagactaactcttggtcagtcttaaattcttaaaattccatcatctgatagagctaacgagagcgggcagctcttcattccatccttgaaaagcacagtgtcctccccactggggaacaccaatccttaaaaaacttctttctcattgcaaatcgaaggaggctgccgctgcacccagccccagactcctcagtcacttacctggcaagctgaggccctaccagtttaaggtgatgattattgtttcttgtattaaattttaaaatgaatttttctccgctttttttttttctaagtagrtttgtgtttctggaatctcgggtgtctgtgagcatttcttcttcagcagagcagtagctgtcaaattttcttgttgcttaatgatatacttttttgtttctagactaagcaaatgatagacatagaggtgaatgctgagaggagagtttaattaatttccattaggaattattatgtggttaccttttcatggagtgttaactaagtattgtgcacttaaatgtagttagaaattaaagcctgatttttatttgcaagaatatttatgatgtctttctcattatctgaaacttgcataaa

SEQ ID NO: 235 - DNA, 601 bp, Human
cttacctggcaagctgaggccctaccagtttaaggtgatgattattgtttcttgtattaaattttaaaatgaatttttctccgctttttttttttctaagtaggtttgtgtttctggaatctcgggtgtctgtgagcatttcttcttcagcagagcagtagctgtcaaattttcttgttgcttaatgatatacttttttgtttctagactaagcaaatgatagacatagaggtgaatgctgagaggagagtttaattaatttccattaggaattattatgtggttaccttttcatggagtsttaactaagtattgtgcacttaaatgtagttagaaattaaagcctgatttttatttgcaagaatatttatgatgtctttctcattatctgaaacttgcataaaacctgaagcatcagcaaaatctttttaaggttgcgtgctcaggtgtttgggaggctttccaggtaagcccgggcccctggcctgctcttaccattttagatgcaggggagggcaagtgggccttgggttttccctgctgctgctgctccccagtagtcctgcagctccaaggatgctggctccagcctttcattcct

SEQ ID NO: 236 - DNA, 601 bp, Human
atttcttcttcagcagagcagtagctgtcaaattttcttgttgcttaatgatatacttttttgtttctagactaagcaaatgatagacatagaggtgaatgctgagaggagagtttaattaatttccattaggaattattatgtggttaccttttcatggagtgttaactaagtattgtgcacttaaatgtagttagaaattaaagcctgatttttatttgcaagaatatttatgatgtctttctcattatctgaaacttgcataaaacctgaagcatcagcaaaatctttttaaggttgygtgctcaggtgtttgggaggctttccaggtaagcccgggcccctggcctgctcttaccattttagatgcaggggagggcaagtgggccttgggttttccctgctgctgctgctccccagtagtcctgcagctccaaggatgctggctccagcctttcattcctgcgtgcagcttctaagaggctctttcttgagcttgggctcttaagaatcttttacctcccgatgggaagttttctctcaccctgtcttcctggcccatgaccacaaaggtatagcccatcctcacgatgatgagctc

SEQ ID NO: 237 - DNA, 601 bp, Human
ctctgctgtttacaaaggaaacaggttttgtaatccacatgtacacaatttttataaaatagctaatttttaagctcttgagtaagagaatattttcactatctggaaaatccccttgtttggacaaccttgtttcctgatggcatcagataaataaggagttaaagtttcacattatttggtgctaccaaggattgttgccttgaaaagaagaaggaaaaagtagatggagggtggtgagttaaaagaattgaaattcgcggataggcatttctatgcttttgttcctaccactcgactstgcaacacgcagtgctttgtaataccttcttggagctcaaaggtcaggctgaaacatggccgctttttcacatttccctgggacttttggaaaatatacaccaaccctgtgacctagcaattccgggatccacccaagagaaatgaaaacatgcccacacaagacttgtgtatgaatgctggtagcagtattactcataatagcctcccgggattcccccgacccccagcccaaaagaaagacccactggaaaccattcagatgttcatcagcagatgagtggatagaaagataaatgga

SEQ ID NO: 238 - DNA, 601 bp, Human
gaagaaggaaaaagtagatggagggtggtgagttaaaagaattgaaattcgcggataggcatttctatgcttttgttcctaccactcgactgtgcaacacgcagtgctttgtaataccttcttggagctcaaaggtcaggctgaaacatggccgctttttcacatttccctgggacttttggaaaatatacaccaaccctgtgacctagcaattccgggatccacccaagagaaatgaaaacatgcccacacaagacttgtgtatgaatgctggtagcagtattactcataatagcctccygggattcccccgacccccagcccaaaagaaagacccactggaaaccattcagatgttcatcagcagatgagtggatagaaagataaatggataaatgaaatgtggcacaaaggacaactgactactcaacaataaaaagacgtgaagtatgacacgtgttacaacatgggtgaacctctaaaacattaggctaagtgaaaagaaaaaatccagacacaaaagactacatattatatgactcattcgtatgtaatttgcagaaaaggcaaaactatagagacagaaagcagaccagggatg

SEQ ID NO: 239 - DNA, 601 bp, Human
cggggagccttgccccaagctgtggctcgaaaaacaagcatggtattgacaggcagctcatgaatggcttgattattattttgacaagggttttatttttatttttctttagcttccacaggctccataatgcctgggttttattgatattggtatcctggctcccagcctcttcaatgattgtaaaaaatgtttgtgtttactgtaaaaagataatcttgcttttcaaagtgattagtcaaatacacagaatttcagtgtgcctgccattcatttgtcaaattcctggtttataattcakgcttcctcccgtgggggagaagaatgttttgttcagaaggtatttttggtgtggttccgttccctgctagtgaaattagtttatgaaaagaggcctggttctgggtgtagatggaagtttggcctgattaattggtccttaccggcagcccagaggtttcttcatcaacaaggagattttgtcctgtaactaactcaggtacctggaagcagcccgacatttgggggtgcatcgctgcagtctcctttggagctggagaaacctatgagcaagaatgggcttatgacacatccatttcca

SEQ ID NO: 240 - DNA, 601 bp, Human
tgccattcatttgtcaaattcctggtttataattcatgcttcctcccgtgggggagaagaatgttttgttcagaaggtatttttggtgtggttccgttccctgctagtgaaattagtttatgaaaagaggcctggttctgggtgtagatggaagtttggcctgattaattggtccttaccggcagcccagaggtttcttcatcaacaaggagattttgtcctgtaactaactcaggtacctggaagcagcccgacatttgggggtgcatcgctgcagtctcctttggagctggagaaaccyatgagcaagaatgggcttatgacacatccatttccactccatccctccttccgttgtatgactgcatggagcccctctgacctccagcagtgtcacctgcagcctggtagtgagaaacagcaggtatggatggggtctacccccagcaacagtagcgccagctgggccatatcctggcactgctccccaggaaacacaccttgtgttgcattgaccagatctgggatcatttggacaatgtcttatgctgcttttccaggatagctgtgtgttcaggagggagcccttactgaaaggaaa

SEQ ID NO: 241 - DNA, 601 bp, Human
ttcctggtttataattcatgcttcctcccgtgggggagaagaatgttttgttcagaaggtatttttggtgtggttccgttccctgctagtgaaattagtttatgaaaagaggcctggttctgggtgtagatggaagtttggcctgattaattggtccttaccggcagcccagaggtttcttcatcaacaaggagattttgtcctgtaactaactcaggtacctggaagcagcccgacatttgggggtgcatcgctgcagtctcctttggagctggagaaacctatgagcaagaatgggctwatgacacatccatttccactccatccctccttccgttgtatgactgcatggagcccctctgacctccagcagtgtcacctgcagcctggtagtgagaaacagcaggtatggatggggtctacccccagcaacagtagcgccagctgggccatatcctggcactgctccccaggaaacacaccttgtgttgcattgaccagatctgggatcatttggacaatgtcttatgctgcttttccaggatagctgtgtgttcaggagggagcccttactgaaaggaaagaactgttgacttacaag

SEQ ID NO: 242 - DNA, 601 bp, Human
catgcccagctaatttttggatttttagtagagacgggatttcatcatgttggccaggctggcctcaaactcctgacctcaaatgatccacgtgcctcagcctcccaaagtgctgggattacaggcttgagccaccatgccctgtccgattatttttcagggaagagccagtgtgctccagccctatgagctctacccttctgctcccacagaagggaagcacaggcctgtggggtggagggggctctgccctaagcgcagcccctgtgggccacgggtttcctgtcccttacactcggcygccttgtttctcccaccccaacatgaaaaagatggagtgagcctgcagccctgagttgatattgctttttaaattgagaacaatataattacagccttgtactggttataaaactttaaggtctcatatcagagatacagcagtgcctttctcatctaaccctgtgtagaatacggctgttgagaatggcgtggctctctggctggatagggttataaaagtaaatcgtcttttcacctttggcttttaataagggaagggtattagaaaaaaagtaatttgtatgatgaagggtgattt

SEQ ID NO: 243 - DNA, 601 bp, Human
caaagtgctgggattacaggcttgagccaccatgccctgtccgattatttttcagggaagagccagtgtgctccagccctatgagctctacccttctgctcccacagaagggaagcacaggcctgtggggtggagggggctctgccctaagcgcagcccctgtgggccacgggtttcctgtcccttacactcggctgccttgtttctcccaccccaacatgaaaaagatggagtgagcctgcagccctgagttgatattgctttttaaattgagaacaatataattacagccttgtactgkttataaaactttaaggtctcatatcagagatacagcagtgcctttctcatctaaccctgtgtagaatacggctgttgagaatggcgtggctctctggctggatagggttataaaagtaaatcgtcttttcacctttggcttttaataagggaagggtattagaaaaaaagtaatttgtatgatgaagggtgatttgtgcgtgtgtgcagacagacacacatgcagggaggcaaatcagaaccgatgcgtgtttggctttggcttgtttcgctggtgtctggatttacctggcgacacttg

SEQ ID NO: 244 - DNA, 601 bp, Human
aagatggagtgagcctgcagccctgagttgatattgctttttaaattgagaacaatataattacagccttgtactggttataaaactttaaggtctcatatcagagatacagcagtgcctttctcatctaaccctgtgtagaatacggctgttgagaatggcgtggctctctggctggatagggttataaaagtaaatcgtcttttcacctttggcttttaataagggaagggtattagaaaaaaagtaatttgtatgatgaagggtgatttgtgcgtgtgtgcagacagacacacatgcrgggaggcaaatcagaaccgatgcgtgtttggctttggcttgtttcgctggtgtctggatttacctggcgacacttgttgctctgggggatcttagagggaagcacgctgactgacctagggctgaacagcaggctgacgaccagcgccgcctcccgccccctgctcactctatccctgcaaagcccctgccttgctccctgttcagatcatagtaaaatcggatgtatccgagtatttcagagtgcttgtctccttagagtcagccagtctgacctgtcagatcataatacgtagtagcc

SEQ ID NO: 245 - DNA, 601 bp, Human
cctgactacagggatctcatcagcttcaccgtttactacaaggaagcgtgagtttctgctttgggtgatgccattctgttgacagggctacgaatgggagaggccagtctttcgatccttgaatgggctggctgaatacagggggtcagcagagtccccagggagagccacgccaaacatccctacttcatcctcatgcaccctctcgggctgtccctgtgatgtcagtcacagccagtgacagccatgattgggaaagtgttagctcgaggcctgtcattctttagtgagtgattagagrtgtttgaataaaataaacccaaaatggggaaagcttgctttttccagaattaggtcagtccagactcatgaacgatgatgggggacttcactgaaatatcgtttcagcctccttacctactaggcctactccaggaacaccctgcaggcacgtggctcttttgtatcatcttattcctgtctctctctctgtgtgcctctcccaagctgtggccctctgctctaggtcatgagccttccaaacaagcgaagaaaagtggagagagaacaaccttcatgtcttgagccttttgtgacttct

SEQ ID NO: 246 - DNA, 601 bp, Human
caaggaagcgtgagtttctgctttgggtgatgccattctgttgacagggctacgaatgggagaggccagtctttcgatccttgaatgggctggctgaatacagggggtcagcagagtccccagggagagccacgccaaacatccctacttcatcctcatgcaccctctcgggctgtccctgtgatgtcagtcacagccagtgacagccatgattgggaaagtgttagctcgaggcctgtcattctttagtgagtgattagagatgtttgaataaaataaacccaaaatggggaaagcttgytttttccagaattaggtcagtccagactcatgaacgatgatgggggacttcactgaaatatcgtttcagcctccttacctactaggcctactccaggaacaccctgcaggcacgtggctcttttgtatcatcttattcctgtctctctctctgtgtgcctctcccaagctgtggccctctgctctaggtcatgagccttccaaacaagcgaagaaaagtggagagagaacaaccttcatgtcttgagccttttgtgacttctcctagactctgttgggagcttttcctgtgtgatcacat

SEQ ID NO: 247 - DNA, 601 bp, Human
ttcactctatagcactgataaacattctttgataatagccattattttagtgggtaaggtgtttttaaatacccataagcgagcacaaaatcagtttaaatggcagagaggagggtgagaagaaaatgctggtggggaaaaccttttgctgtgcacgcctgctccttcctccactcctaccccatctccatgaccctgtaagtggccacagtcatgtcactgggtaaagtgcttattgaaacaaaattggcacaggcttctgatcctgcgtgtgggttggtgtagcagaggttcagtgcarcagaagaagtttttcatcttaaaatttggaagtaacccctggccagcaattcactgtagtgtttgggaaacataggaatatctgcttattgtgacagattctcaagaaacctgtttcctttccgcaaagatggaaaccaggcactgtaccaatgagtcagttcactacgttttgtcctctgtccttacacgcagcggagacagacgagaacttggtcctctgcctctgctgtttggtgacacctatcgtaagaatgtatctaggaatgagctgtttgtttttgaagtacttatttttgga

SEQ ID NO: 248 - DNA, 601 bp, Human
ttggtcctctgcctctgctgtttggtgacacctatcgtaagaatgtatctaggaatgagctgtttgtttttgaagtacttatttttggaaaccctaaagtggctgagcatcaagtggttgtgttttctctgaaaacgccagtattagtcataacctttttccaaagtatcatcccttaaagatgttcagaaccttgtgtgtatcgtataacctggagcaccctcaagctgtccgcccttttcaagttttaaaaatggcttaggcaaacatattgcttaagtgatatccagtgaaggtgtcycctgtgctttgaaaaaccatcaacattgatgcttttttgtgacccaataaggacaagatttcagtggttctgggatgcatttgatctttatgcacacttcagctctgggtttcagttcaggggtcagcataagtaaagcttgatcagataactatgctttgcctataatcggcattcattctgctggtgacagagtcctttgctcaaaatgaggcttccatgcgtttgcagttctaaactgcttttcagagtcatgcctcagtcattgtactgaaggatgcctgtggaaatggtggactt

SEQ ID NO: 249 - DNA, 601 bp, Human
aggatgcctgtggaaatggtggacttccgtgttctttgcattgcctctcccccatccctcttacacacagctgtgacatgggcatgcacactccttcacacacacagactctccagccccctttccacttcctctttccatttggcttcatgacatttttatcagagattcaaaatctcagatgaaatccaagtcagcctgttttaccagttgtcgaaattgccggagtgcagcactgtggagaatggcagttgtaataaatgagaaataccaggtgtttgaattagctgtagattttcayattgtctcttctaaccctgcttgtgcccccgcagcctttttccatttacaactcagtaatgtttgttttcacagagattaccggaggaaatagattataaagggaaatgttggcatttatagtagtactatttcaaaataaggttcacttttcactttgtatttcattgttcattgttattttcttatccaggtcaaactggcagtttcctgttggcttgccagagtatctgatagcctgactcttaagttcatttcattttctagaatgttctttgttcccctctccagttccttccat

SEQ ID NO: 250 - DNA, 601 bp, Human
agttccttccattcccttggacgttctttcagcatcgaactcctcttctcagttaatcgtgaagtggaaccctccctctctgcccaacggcaacctgagttactacattgtgcgctggcagcggcagcctcaggacggctacctttaccggcacaattactgctccaaaggtaagggtgcagcagcggcctggacggagggtgtgaccgttcattcctgtggttgtaatgtgcctgagccctaatattacacgtatcagacaacagtgtagttctccattggaaaccagctatcttctggttttttttttttttttttgagacagagtctcactctgttgcccaggctggagtgcagtggcacgatcatggctcactgcaatttctgcctcccaggttcaagcatttctcattccccagcattccgagtagctgggattacaggcatgcaccaccatgcccagctaatttttgtatttttagtagagacggggtttcaccatgttgcccaggctggtctgaaactcctaacctcaggtgatttgcccgcctcggcctcccaaagtgctgggattatagccttgagccaccacatctggccg

SEQ ID NO: 251 - DNA, 601 bp, Human
cacaattactgctccaaaggtaagggtgcagcagcggcctggacggagggtgtgaccgttcattcctgtggttgtaatgtgcctgagccctaatattacacgtatcagacaacagtgtagttctccattggaaaccagctatcttctggttttttttttttttttttgagacagagtctcactctgttgcccaggctggagtgcagtggcacgatcatggctcactgcaatttctgcctcccaggttcaagcatttctcattccccagcattccgagtagctgggattacaggcatgcacyaccatgcccagctaatttttgtatttttagtagagacggggtttcaccatgttgcccaggctggtctgaaactcctaacctcaggtgatttgcccgcctcggcctcccaaagtgctgggattatagccttgagccaccacatctggccgagaccagctatcttcttgattaaaggtactgagagctattatttttccttacaagcatgtataacggctttcattcccactcttgttttggcttttcttttccgagaagacaaaatccccatcaggaagtatgccgacggcaccatcgaca

SEQ ID NO: 252 - DNA, 601 bp, Human
aaatctggaaacccagtgtacatcaacaggtgagtggctcaataaaatgggctcgaaccttacagtagaatattattcagccataaaaagggaggaaattttgatccatgtcacaacacagatgaaccttgaagacaccatgccaagtgaaacaaggccagacacaaaaggacagatagtgtatgattttatgttgtgtgaaatatatggaatgggcaaatgtatggtgacagaaagtagatttgaatttaccaggggatggggatagagtgtggaggggaatgggaattattccataatygataggttttctatttggagtgatgaaaatttttggaaatagataatgatgatagctgtaccattctgtgaatgcaattaatgccactgaattgtacccttaaaatgattaaaatggcaactttttatcttacatatattttgttttgttttaaaattttattttaacacaataaaaaatgttaaacaatttttttttcctttcaaaaaaggattagcccagtagtgtgtgggaaaggagatggaagcacagtggtgctccctggccccctcttcctgtaagattatagtgcagattttg

SEQ ID NO: 253 - DNA, 601 bp, Human
gaagctagagtttgtaaaacttactagtttctgaagtcaatattcgcagtaaatgcctttctttgactactgtctttattttgtaaatcacatagtttggtttaactagctaaaatgttgacagatgttggaaagtaaaaggttttccaatagggctaggttgtattatgggatggagtggggaaagttggcagtaatgtttgcttttgggcgtacgatttggaaatgtagttgtttaccaaaaaaaatgatgtatgggccattgtgcttcccctgttcctgccttccagataatgttctstgtcacctccctccccttgtcactgccttgatgtcatcagcattgagagctgtgcagtccctaaaagtgtgatgttgataaacaagtaaactactgagtatacttcatgaagtaatcccagttaaatgggggtgggctgagccgggagaggggttttgacagaattattttgcggtacatcaaacctaagcaacttctgacagacacaagtgtatgttgtgttggttttgaaggtaggcaggaaatttgttgatgatgtgttgacaaagatttccctgacagtaaatgtggtttcttgtg

SEQ ID NO: 254 - DNA, 601 bp, Human
ttgtaaaacttactagtttctgaagtcaatattcgcagtaaatgcctttctttgactactgtctttattttgtaaatcacatagtttggtttaactagctaaaatgttgacagatgttggaaagtaaaaggttttccaatagggctaggttgtattatgggatggagtggggaaagttggcagtaatgtttgcttttgggcgtacgatttggaaatgtagttgtttaccaaaaaaaatgatgtatgggccattgtgcttcccctgttcctgccttccagataatgttctgtgtcacctccstccccttgtcactgccttgatgtcatcagcattgagagctgtgcagtccctaaaagtgtgatgttgataaacaagtaaactactgagtatacttcatgaagtaatcccagttaaatgggggtgggctgagccgggagaggggttttgacagaattattttgcggtacatcaaacctaagcaacttctgacagacacaagtgtatgttgtgttggttttgaaggtaggcaggaaatttgttgatgatgtgttgacaaagatttccctgacagtaaatgtggtttcttgtgtttttcccttc

SEQ ID NO: 255 - DNA, 601 bp, Human
acagctgcaaccacgaggctgagaagctgggctgcagcgcctccaacttcgtctttgcaaggactatgcccgcaggtatggtatgatccagctggccccattgccaccttcctcacaacctagtggagaagatgtgttttatggacacagggtctgacacccagggccatgacccttagacccaggcctgcctgctaaataacgtgcagtcattggcaggtggcgtgtagaccagctgcccagggaacagagcccacgctctcctagtgacaccactcccagcttggtctctccatagaaygtgctgggagcagggagctgtctgcagggtccaccctccacctgctacttggtgcacatcgtgcattcctgctgtcctttgccccctcttgcgcacaaatcgggttgccccctcctgagctctcacatgtccagagatgtctccagttagttgccttgatccagagtaaacattgcccctcaagatcaactcctggagtagcctctggtcttgcttatttagtctttggctttcccttgttgttagacactgcctgtcactcgggcattcatccatctttgaaggtgggtgccttcaaag

SEQ ID NO: 256 - DNA, 601 bp, Human
taacgtgcagtcattggcaggtggcgtgtagaccagctgcccagggaacagagcccacgctctcctagtgacaccactcccagcttggtctctccatagaacgtgctgggagcagggagctgtctgcagggtccaccctccacctgctacttggtgcacatcgtgcattcctgctgtcctttgccccctcttgcgcacaaatcgggttgccccctcctgagctctcacatgtccagagatgtctccagttagttgccttgatccagagtaaacattgcccctcaagatcaactcctggagyagcctctggtcttgcttatttagtctttggctttcccttgttgttagacactgcctgtcactcgggcattcatccatctttgaaggtgggtgccttcaaagacagaacaagagctgccctgtcctttagtaggcctcaggtggtagaaagagcacggaggtgaccagagtctggggtgtggggtcctcctgggtgcagttctggcactgaagtccattgtagcgtgccttgaggcagtcgtcaggctccctgcctcagtttccttagccctcctgggagagacatagccagctaacccct

SEQ ID NO: 257 - DNA, 601 bp, Human
tcctagtgacaccactcccagcttggtctctccatagaacgtgctgggagcagggagctgtctgcagggtccaccctccacctgctacttggtgcacatcgtgcattcctgctgtcctttgccccctcttgcgcacaaatcgggttgccccctcctgagctctcacatgtccagagatgtctccagttagttgccttgatccagagtaaacattgcccctcaagatcaactcctggagtagcctctggtcttgcttatttagtctttggctttcccttgttgttagacactgcctgtcacycgggcattcatccatctttgaaggtgggtgccttcaaagacagaacaagagctgccctgtcctttagtaggcctcaggtggtagaaagagcacggaggtgaccagagtctggggtgtggggtcctcctgggtgcagttctggcactgaagtccattgtagcgtgccttgaggcagtcgtcaggctccctgcctcagtttccttagccctcctgggagagacatagccagctaacccctcaagtgccttttccggctgtaactttccatgacctttgcttatcacaactttgtttactgct

SEQ ID NO: 258 - DNA, 601 bp, Human
agggagctgtctgcagggtccaccctccacctgctacttggtgcacatcgtgcattcctgctgtcctttgccccctcttgcgcacaaatcgggttgccccctcctgagctctcacatgtccagagatgtctccagttagttgccttgatccagagtaaacattgcccctcaagatcaactcctggagtagcctctggtcttgcttatttagtctttggctttcccttgttgttagacactgcctgtcactcgggcattcatccatctttgaaggtgggtgccttcaaagacagaacaagarctgccctgtcctttagtaggcctcaggtggtagaaagagcacggaggtgaccagagtctggggtgtggggtcctcctgggtgcagttctggcactgaagtccattgtagcgtgccttgaggcagtcgtcaggctccctgcctcagtttccttagccctcctgggagagacatagccagctaacccctcaagtgccttttccggctgtaactttccatgacctttgcttatcacaactttgtttactgcttcaagaagcaaaagcaagaaaggaaccactgcaaggtcagccagccgctgg

SEQ ID NO: 259 - DNA, 601 bp, Human
ttatagaatactattctaccataaattagaaaagaaaaatgtcgtttgtggcaacctggatgaacctggaggacatgatgttaagttaaataagccagacacagaaagagaaataccacatgatctttctgataatgcggaatctaagaagttaagctcatggagagtagaatggaggttaccaggggctgagggtgagggagcagatttggggagatgttagtcaaaggatacaaaatttcagttagataggaggaataagttcaatagatatattgtacatgatgacagtaataatgaggtattcttaaaaattgctgagacaatagattttaagtgttctcaccacacacaaaaaaatgtgatgtaatacatatgttaattaggctcattcagctgttctacaatgtatgcatatttcaaaacaatatgttgtacatgataaatatacaatttttatttgtatattaaaattaattaattttaaaaaagatctccagtagtcacctggtcagcaccagatattctaatctgtttgtgatatctgaaaatcctaatacagacagcaaaagcaggatggggtgaatagaactgcaaatct

SEQ ID NO: 260 - DNA, 601 bp, Human
ttctgataatgcggaatctaagaagttaagctcatggagagtagaatggaggttaccaggggctgagggtgagggagcagatttggggagatgttagtcaaaggatacaaaatttcagttagataggaggaataagttcaatagatatattgtacatgatgacagtaataatgatgtattcttaaaaattgctgagacaatagattttaagtgttctcaccacacacaaaaaaatgtgatgtaatacatatgttaattaggctcattcagctgttctacaatgtatgcatatttcaaaacaatatgttgtacatgataaatatacaatttttatttgtatattaaaattaattaattttaaaaaagatctccagtagtcacctggtcagcaccagatattctaatctgtttgtgatatctgaaaatcctaatacagacagcaaaagcaggatggggtgaatagaactgcaaatcttgagccaacattttatgtgcctggcactgttcctgggttcaggtttttaggggtaaatggatgtttaggcagataattttgtcaattaaaatagtctgaattgttccatctagtccagttaaccta

SEQ ID NO: 261 - DNA, 601 bp, Human
taatgcggaatctaagaagttaagctcatggagagtagaatggaggttaccaggggctgagggtgagggagcagatttggggagatgttagtcaaaggatacaaaatttcagttagataggaggaataagttcaatagatatattgtacatgatgacagtaataatgatgtattcttaaaaattgctgagacaatagattttaagtgttctcaccacacacaaaaaaatgtgatgtaatacatatgttaattaggctcattcagctgttctacaatgtatgcatatttcaaaacaatatgytgtacatgataaatatacaatttttatttgtatattaaaattaattaattttaaaaaagatctccagtagtcacctggtcagcaccagatattctaatctgtttgtgatatctgaaaatcctaatacagacagcaaaagcaggatggggtgaatagaactgcaaatcttgagccaacattttatgtgcctggcactgttcctgggttcaggtttttaggggtaaatggatgtttaggcagataattttgtcaattaaaatagtctgaattgttccatctagtccagttaacctagtctca

SEQ ID NO: 262 - DNA, 601 bp, Human
gatattctaatctgtttgtgatatctgaaaatcctaatacagacagcaaaagcaggatggggtgaatagaactgcaaatcttgagccaacattttatgtgcctggcactgttcctgggttcaggtttttaggggtaaatggatgtttaggcagataattttgtcaattaaaatagtctgaattgttccatctagtccagttaacctagtctcaccagttagtctatgccacctttgcagcacccagaagcttcataatattcctgcagccttgtccagggtagtggcttgcttgctttctrtctttccccagcctccttccctcctctttttcctcccctccatctcctagaaacagatcctagtttgggggtctgtgatctgtgaaacagcaaccttggcttctggggttgagtgaactcagcttgttttggtgacatgacatgttcctgtctgcctttgctgctccatttttaaccttgtaagtgccaggatgccagtgggaaatcgggagtccttctgatagaatttttccagcagatgttatcacgtactgcagggaaattggatctgcgtgctggccttactgttgagaaattttt

SEQ ID NO: 263 - DNA, 601 bp, Human
aattttgtcaattaaaatagtctgaattgttccatctagtccagttaacctagtctcaccagttagtctatgccacctttgcagcacccagaagcttcataatattcctgcagccttgtccagggtagtggcttgcttgctttctatctttccccagcctccttccctcctctttttcctcccctccatctcctagaaacagatcctagtttgggggtctgtgatctgtgaaacagcaaccttggcttctggggttgagtgaactcagcttgttttggtgacatgacatgttcctgtctgsctttgctgctccatttttaaccttgtaagtgccaggatgccagtgggaaatcgggagtccttctgatagaatttttccagcagatgttatcacgtactgcagggaaattggatctgcgtgctggccttactgttgagaaatttttccttatgtcagacaagactctgtcctgctacagtttagtctcatttcctcttatttaatcctcagaggagatggaaggtttggaagctttcaggcaactgccttccttttaggaactccttgtgtgcctgaatactattaaattactcctcagac

SEQ ID NO: 264 - DNA, 601 bp, Human
atcatacaccagtttcctagccatttaatcatttttgttattctctggatgtgttccattttctccatgtccctgttgaaatgtgaaactcaaaaagaacacagtacagcctgaccagtagtataagtgatataaacagtgatataagggccttgggggaagaaagaaaaatctgccagctttccgttggtaatgatcacctctgagtgtttttaggaattgcaaaatgctggagcctgcatccattttgagagctacaatatcaataaaaatacttctttcttcgattaaaatacttctmattttaaaaattaaaatagctgtagtagtctttaaagagtaaccatgatcacagttttccatggcaaaataatcattgataggggacttacgattaatgtttacttgatccccagtgattccaggcccatttccacatagacatctgtatttggacgtcccagagaggtctcagattccttgtgccaaaaccaaaatcacagttgttgccctcgaaaggcctcttctctcctttgctccttagctcagtcagtggtcttgtaatccatttgttacccaagccaggaacctcacagcatcc

SEQ ID NO: 265 - DNA, 601 bp, Human
ttggacgtcccagagaggtctcagattccttgtgccaaaaccaaaatcacagttgttgccctcgaaaggcctcttctctcctttgctccttagctcagtcagtggtcttgtaatccatttgttacccaagccaggaacctcacagcatccttcactcttctttctgttcagccacccctttttcattccaacccaagcctcatggattctgcctcttaaatgtctctggaatccagccctctgtcaccaccagcaccgccacagctcagactccaggtcactcgccttggggggatggtakgagctgtcatactgtatgagcctcatcctggggccatgacttaccaagccagatcatctctgtgagtctgcctggtgtaaagacaaggatcagtgacttctttgtaggtctgaactgggtaatgcagagcatgccctggagacatggcatgtccccccaattctccaagacatgacagtgccttctcttactgccaggtccctccgtctgtcctcagcacagccatttccctggaacgcgaatctgatcagttcactgctgggcctgaaagctttcgctgactccttttaatctgcagaa

SEQ ID NO: 266 - DNA, 601 bp, Human
ctgtggaatgtgggaaattagtgtcaaatgtatgcattttcactaacagtcattaaactgcgtacaaagattatttttcttcagtctatcattgaaactattgcaccagaatatactgtactttaaaaaatgagtatatgcctcagtctgcacatatttactcttttttcaaataattgtttgtttgccgtgttctatttctgacaccatttaccttcaggaattcttactgtatgatggggagtaaacgaatatacaggtatttttttcatacttccaactgaatgtgaagaaatgaaaygagcaaattgttcacctggtgatattttatcatttcctcctctttgctgcagcaggatatgaaaacttcatccatctgatcatcgctctgcccgtcgctgtcctgttgatcgtgggagggttggtgattatgctgtacgtcttccatagaaagaggtcagtgatgtgcaaagttatgacactttctgtggctgagtggtttgatgatttgaatgtgagtgaaggtgatatttttgaagatttcaaggaaatattttatggactggaaaacctgattttcccatcaaatgttcttccagga

SEQ ID NO: 267 - DNA, 601 bp, Human
gagtgtagacaagagctgctgtagacagtaagctctccccattctgttctgataccgtgtgagagaggataaatgaaactgttgtagcgaagatgaaagtatatacaggaatgtatggaggtggggttttgttaacgtgaatttaatctttttgacagaaataacagcaggctggggaatggagtgctgtatgcctctgtgaacccggagtacttcagcgctgctgatggtaagagtccgggccaccagcactgccagcgtgcagggcaggtagatcgggagctttcaggagggttgctartttgggaaaggaaggaggtttgcattattttgagctacctttggccttggatctgtcttcattaatatttctttctttctttttttttttaatcaaagtttttagcagttcagtgaatatgtcaaaacttgtgggactgtatggggtgccccaaggaaacacaggctttagagatgaatgtggccagcgcagtaatcaatttatttaattgcttgagatgttatgctagaatgaaaacagctttttaattgttaacatctagtcagaggatatgctgcagctgacaaaacagtcctttta

SEQ ID NO: 268 - DNA, 601 bp, Human
cccagctactcgggagactgaggtgaaaggattacctgagcccaagagctgcagtgagctagaatcccaccactgcactacagcctatagagcgagactggctcttaaaatccagcaagaagatagatatgcattgtttgtatgaataatagcttctaaaaagaaaatcagtaaggaagggagtcatcccagatgatggaattgatagaacaaggcaagaccactttccccctctgtgagggtggactgtgactctacgagagaagctattctgctttgaaatgcggcactagaggttggygtgtgtagcttttgactgtgaagtgtccaggaagagaaagcatcaatacaacaaattcagattctcagggctctcatggtgacttgaattcacattttgtgtccttctagaatgctttcatgatacgtcttggtacttcattacaacaaaaacaaacttattgccacccaggtcgacaggtgggaacagtgtcaccttatttgaacttaatttattcggcctttgagaagcacttatagccagtttcctcgaggggcaacaaaatgacattgcagttcaaaagtgctttaaaaacttctt

SEQ ID NO: 269 - DNA, 601 bp, Human
acaaggcaagaccactttccccctctgtgagggtggactgtgactctacgagagaagctattctgctttgaaatgcggcactagaggttggtgtgtgtagcttttgactgtgaagtgtccaggaagagaaagcatcaatacaacaaattcagattctcagggctctcatggtgacttgaattcacattttgtgtccttctagaatgctttcatgatacgtcttggtacttcattacaacaaaaacaaacttattgccacccaggtcgacaggtgggaacagtgtcaccttatttgaacttratttattcggcctttgagaagcacttatagccagtttcctcgaggggcaacaaaatgacattgcagttcaaaagtgctttaaaaacttctttttcccaaagctataatctgcatgtcaccattctccagagtacattgaaaatcccctacaggaaagtgctgataacattgtgcacagaaaccgctcctggctggtggcactggggacgcctgcttaaagtcggagccgttgggttgaatcgagagaaaaggattgagcgtattgacttcagggacctcccagggaatgaatgtgattgg

SEQ ID NO: 270 - DNA, 601 bp, Human
taatagagacagtgttttgccatgttgcccaggctggtctcaaattcctgggctcaagcgatcctcccaacttggcctacgattacaggcatgagccaccgcacacggcccatttattttcttaaaccagatcgaatctaaacagaaacagaaactggagaagaaatcctattcaggcttggtatctactgtgcattcctcccaaatctctacccattggtcaaggtccctgagttcacagagcccaggccagagccctggaaacgcctctgcccgtccgctgcctaattgcctgtccacrctgggcaccaccgggtctctccctcagtctcagagctcagttgcttctgcacctcatcagggatccagccatcaaagccaaggctgggggacacttggactagagtaatcctaccaataatgcagttcagctttgtaaccgcaaattttctagtagccgtattttttaaaagtaaaaagaaacagatcaaatgcattttaatagttttttagttccaataatacgtttcgtgtaacccagtatatccaaaatatccattttaacatggagtcagtattaaagttacctaaatatttcact

SEQ ID NO: 271 - DNA, 601 bp, Human
gttttgccatgttgcccaggctggtctcaaattcctgggctcaagcgatcctcccaacttggcctacgattacaggcatgagccaccgcacacggcccatttattttcttaaaccagatcgaatctaaacagaaacagaaactggagaagaaatcctattcaggcttggtatctactgtgcattcctcccaaatctctacccattggtcaaggtccctgagttcacagagcccaggccagagccctggaaacgcctctgcccgtccgctgcctaattgcctgtccacgctgggcaccaccrggtctctccctcagtctcagagctcagttgcttctgcacctcatcagggatccagccatcaaagccaaggctgggggacacttggactagagtaatcctaccaataatgcagttcagctttgtaaccgcaaattttctagtagccgtattttttaaaagtaaaaagaaacagatcaaatgcattttaatagttttttagttccaataatacgtttcgtgtaacccagtatatccaaaatatccattttaacatggagtcagtattaaagttacctaaatatttcactttttttttttttt

SEQ ID NO: 272 - DNA, 601 bp, Human
cgcacacggcccatttattttcttaaaccagatcgaatctaaacagaaacagaaactggagaagaaatcctattcaggcttggtatctactgtgcattcctcccaaatctctacccattggtcaaggtccctgagttcacagagcccaggccagagccctggaaacgcctctgcccgtccgctgcctaattgcctgtccacgctgggcaccaccgggtctctccctcagtctcagagctcagttgcttctgcacctcatcagggatccagccatcaaagccaaggctgggggacacttggrctagagtaatcctaccaataatgcagttcagctttgtaaccgcaaattttctagtagccgtattttttaaaagtaaaaagaaacagatcaaatgcattttaatagttttttagttccaataatacgtttcgtgtaacccagtatatccaaaatatccattttaacatggagtcagtattaaagttacctaaatatttcacttttttttttttttttgtctaatctttgaaatcccatgtgcatgtctcaaattggactggccacatggaatgctcaggagtcccatgtagggaccagctg

SEQ ID NO: 273 - DNA, 601 bp, Human
gagtcccatgtagggaccagctgccatgttagatagcccaggcatagcatctgtgttgagggccctgacacctcttttggattcatccaagaagtaggaccttacgtgcaccatcatcacctctcatatgtgactctggcctttttcccgacccagcataagaactcttccctctccctactactctcctcctttttacatttgcgttttaatctgttggtgaagatgggtaaaatcctgcttgaccatttcattcagtttctcaatcccctgtggttaatttgtttttttcaaaaatgtrtttttatgtgatgaaaagaaatttttaaaaaccaactgctttctttcctatactagacttccttgctttgttctggtccttctatctgttagtatcctcaaattatcttgaaatcctcagagatctgaaatactagtactgactgtacagttttcttactcaaatctatagcatgtggaaagttgacagcaagccatgccatcgcctcctggtattctctgtgggtttaaggaagcagcatcttatattctttggcttagagttcccccaaagcacgttctgtctaagggcttgtttctg

SEQ ID NO: 274 - DNA, 601 bp, Human
cgcctcctggtattctctgtgggtttaaggaagcagcatcttatattctttggcttagagttcccccaaagcacgttctgtctaagggcttgtttctgtacctgctttaattacggtttcttctccagtgtacgttcctgatgagtgggaggtggctcgggagaagatcaccatgagccgggaacttgggcaggggtcgtttgggatggtctatgaaggagttgccaagggtgtggtgaaagatgaacctgaaaccagagtggccattaaaacagtgaacgaggccgcaagcatgcgtgaraggattgagtttctcaacgaagcttctgtgatgaaggagttcaattgtcaccatgtggtaagagaaagttcctgaaaagccaaaatgcagcacagggagagggtatcacacaagcctcccagtatgttcttggctgcatgtacccgtgggtttggtgtcttgcctttgccttctggatagttaccccattacctcactgctaccttcagacccctgtgctcagaccaggccgcagcaccacagagacagttccagacaacacaggcaccagcaagggccaccctgaccctctgagtcttt

SEQ ID NO: 275 - DNA, 601 bp, Human
ctccctccccgaagctttcctgccccactccagtagctatctcctctgctaacttctcgatgcgcttgactcacatcctcgtatgtgttctctctcgttatgttgtgttgtgctgttgttggagtgtgtcccccctccaccccgttgtgtttagcttttcatctcagtccaagtgtgtggctcagggccgcatttgtggcaggcactctgtcaataaatgtatgttacagttcaaggttaagctgcctggattcttgcccttgcatctgggaagttgctgggtgatttcccacccagctcygtgcgcaagatgtgcactcattcataaaccccctccccacacacagtccccttccccggcattgttggcggtccttgtctttgccactgggaatctggtttcctcagactctacgtccacgtttcaggattgatccagagtcagtgtcctgcttacgcttttgaatgaatgatcccacctcagctgcaggatttctgcttagtttcctaaaaatttcactttgggttatgagcttccaattctaaacctgctaaagtcctatgcaatttttcattaaaagtcaccgtggtgtctcccccc

SEQ ID NO: 276 - DNA, 601 bp, Human
attaaaagtcaccgtggtgtctcccccctctgtagtattaacccacaggccagctttttaacatatgcgggcatgacttttgagtaattaattctacaaataaactgggagataaatgctgagacataaagccagcaagaactgagttttcatttggttgcctccgtgggtctgaagtctttgacccttactttgctgcttactgggtaagcagtgtgtctgcttttattccttagaagcagtgacttccccttctcggcccctttggaaattcttttgctgttcttcatttgggcttaatttttttttttttttaatgttctttgaatcggcaacttaatcatctcccaagtgacagtttcttaattttagttccaaacacctgttcacatatgacttcatgtatttgcagcacatggtgtttggggccaagtgtggactggggcttcaagcaggatggtttacaaaactcccaccctctgttctgccaagcattggtccccagcacccctgggtgttagtgcctcttcctggttcactcactcactttctctggccctctctgtgtctctctcactctctttctttcgagatggagttt

SEQ ID NO: 277 - DNA, 601 bp, Human
aactgggagataaatgctgagacataaagccagcaagaactgagttttcatttggttgcctccgtgggtctgaagtctttgacccttactttgctgcttactgggtaagcagtgtgtctgcttttattccttagaagcagtgacttccccttctcggcccctttggaaattcttttgctgttcttcatttgggcttaatttttttttttttttaatgttctttgaatcggcaacttaatcatctcccaagtgacagtttcttaattttagttccaaacacctgttcacatatgacttcatktatttgcagcacatggtgtttggggccaagtgtggactggggcttcaagcaggatggtttacaaaactcccaccctctgttctgccaagcattggtccccagcacccctgggtgttagtgcctcttcctggttcactcactcactttctctggccctctctgtgtctctctcactctctttctttcgagatggagttttgctctgttgcccaggctggggtgcagtggcatgatctcagctcactgcaacctccaccacctgggttcaagcgattctcctgcctcagtctcccaagtagc

SEQ ID NO: 278 - DNA, 601 bp, Human
tcttttgctgttcttcatttgggcttaatttttttttttttttaatgttctttgaatcggcaacttaatcatctcccaagtgacagtttcttaattttagttccaaacacctgttcacatatgacttcatgtatttgcagcacatggtgtttggggccaagtgtggactggggcttcaagcaggatggtttacaaaactcccaccctctgttctgccaagcattggtccccagcacccctgggtgttagtgcctcttcctggttcactcactcactttctctggccctctctgtgtctctstcactctctttctttcgagatggagttttgctctgttgcccaggctggggtgcagtggcatgatctcagctcactgcaacctccaccacctgggttcaagcgattctcctgcctcagtctcccaagtagctgggattacaggtgtgtaccaccacgcccacctaatttttgtatttttagtagagacggggtttcaccatgttggccaggctggtcttgaactcctgacctcaggtgatccacccacctcagcctcccaaagtgctgggattacaggtgtgagccgctgcacctggccct

SEQ ID NO: 279 - DNA, 601 bp, Human
tgtttggggccaagtgtggactggggcttcaagcaggatggtttacaaaactcccaccctctgttctgccaagcattggtccccagcacccctgggtgttagtgcctcttcctggttcactcactcactttctctggccctctctgtgtctctctcactctctttctttcgagatggagttttgctctgttgcccaggctggggtgcagtggcatgatctcagctcactgcaacctccaccacctgggttcaagcgattctcctgcctcagtctcccaagtagctgggattacaggtgtgyaccaccacgcccacctaatttttgtatttttagtagagacggggtttcaccatgttggccaggctggtcttgaactcctgacctcaggtgatccacccacctcagcctcccaaagtgctgggattacaggtgtgagccgctgcacctggcccttggttcactttaatacacaaaacagcatgaaggagaaaagcttgatgaaataggtgactggagatctggcagagtatttcttgccagcatcgattgaggcacctctgaaaagtccaaaactcactcccttcctctccagtttcaggc

SEQ ID NO: 280 - DNA, 601 bp, Human
gccaagtgtggactggggcttcaagcaggatggtttacaaaactcccaccctctgttctgccaagcattggtccccagcacccctgggtgttagtgcctcttcctggttcactcactcactttctctggccctctctgtgtctctctcactctctttctttcgagatggagttttgctctgttgcccaggctggggtgcagtggcatgatctcagctcactgcaacctccaccacctgggttcaagcgattctcctgcctcagtctcccaagtagctgggattacaggtgtgtaccaccaygcccacctaatttttgtatttttagtagagacggggtttcaccatgttggccaggctggtcttgaactcctgacctcaggtgatccacccacctcagcctcccaaagtgctgggattacaggtgtgagccgctgcacctggcccttggttcactttaatacacaaaacagcatgaaggagaaaagcttgatgaaataggtgactggagatctggcagagtatttcttgccagcatcgattgaggcacctctgaaaagtccaaaactcactcccttcctctccagtttcaggcacagaata

SEQ ID NO: 281 - DNA, 601 bp, Human
tgtgtctctctcactctctttctttcgagatggagttttgctctgttgcccaggctggggtgcagtggcatgatctcagctcactgcaacctccaccacctgggttcaagcgattctcctgcctcagtctcccaagtagctgggattacaggtgtgtaccaccacgcccacctaatttttgtatttttagtagagacggggtttcaccatgttggccaggctggtcttgaactcctgacctcaggtgatccacccacctcagcctcccaaagtgctgggattacaggtgtgagccgctgcrcctggcccttggttcactttaatacacaaaacagcatgaaggagaaaagcttgatgaaataggtgactggagatctggcagagtatttcttgccagcatcgattgaggcacctctgaaaagtccaaaactcactcccttcctctccagtttcaggcacagaataaaaattcagaacacatggccttggtcctggctctgtggctggctgcctgtggtcctcagacagctgctgcaggttcctgggcctcagtgtcctcaatatgaaataagagggtgggacaagattactgaagtccctt

SEQ ID NO: 282 - DNA, 601 bp, Human
tgtgagatgctttgtggtcaagaaaaccaaggtgtagagtctgttgcacttgtatatgcaaaagtaaaaggtaacattaaaattagggactagtgattgttttaggatggagagacttgggcatgtgttttatataaaacttttttctaaatggatgtattatttaagggtaattctttttaattccaaagccagcacgttgctgtcctctgcaaagaggaatgcttatccctgttacttattcctggtttcctccaagactagtttcagctggacttcagttgccaaggacttgtcttcygtaatgcccacagaaaataataatgccacattgtaaggtgaaaacagtaatcctggtatttttgtattttagaagaaggttgaagggaaagaaaaggattaaataatttataacgatgcttttatgggaaataaaatataccatgtccatttggaaacacatttgcttacttccacacagcctttgtaacgtgctctccttcctcttacctgtacttcggtgatggaaataaaaggaacatataaacaaataggaatttgagtaactgagaatccttactaccaaaaatggcttgtttca

SEQ ID NO: 283 - DNA, 601 bp, Human
ccctggagaggttttctagtgtgtcccttgagtgcacggactccttcttgggaatgatgtgattgtctccagttgatggtcacaaacctggcacggtcggtcccaatgctgatagctcatggacatggtggttcagatactgggcacggtccctgaggctggctctccagacgtttgaggcatttcttggtagaacacctcttagcattggttacagaaataattaagacaatgtcttcaggagattttgacttgggaataaaactcactgtccaaccttgcattcatccctccaattttyctagcttttaaggagcattgctccccttccagggacccacattggtttctaagaggcaagctgccctaatgacgaagcctctgcacggagcaggagcagtggcaggagctggcatggcagtcccttaggtgagggacgatcactgctcactgggtttcacggctggggctggccagcctccaagctctcgaccactctctcacaacacttactgtcctgctcttagctcaccagcctactggttagactcccttgttgccaccacccactgtcacaccagaaaaaagggttggattgaat

SEQ ID NO: 284 - DNA, 601 bp, Human
gggaatgatgtgattgtctccagttgatggtcacaaacctggcacggtcggtcccaatgctgatagctcatggacatggtggttcagatactgggcacggtccctgaggctggctctccagacgtttgaggcatttcttggtagaacacctcttagcattggttacagaaataattaagacaatgtcttcaggagattttgacttgggaataaaactcactgtccaaccttgcattcatccctccaattttcctagcttttaaggagcattgctccccttccagggacccacattggtttmtaagaggcaagctgccctaatgacgaagcctctgcacggagcaggagcagtggcaggagctggcatggcagtcccttaggtgagggacgatcactgctcactgggtttcacggctggggctggccagcctccaagctctcgaccactctctcacaacacttactgtcctgctcttagctcaccagcctactggttagactcccttgttgccaccacccactgtcacaccagaaaaaagggttggattgaatttctgagcaatggttaaaacccacttcagcctttaggtttgtgttttta

SEQ ID NO: 285 - DNA, 601 bp, Human
ttctttttactctgtaggagctagaggtattgaaatggaaccatatcccagagcccacatccctccgtcatcagagttcctcattcaggatccaccagtgtgtccctaggtttggcacgttgagacgtcctcacgtttggtgctctgtgaagctgggcagccctcagagaggcaaagaagtcccaagaggccgtcctgcctcagggctctcaggaaagagccgcccgcgtccctggctgggcttccttggtgcacccagctcatttctccttccctctctgtagaactcacattgtccccrtggaaatgccagccagctcccctttcccagtgcaggggggagccaggtgggcctgaggtgggccagttctgccgctaatgggtgagagacttgggccaggtgccttacatccgggagcctcagtttcctcacctcggaaatagggtgataatgtaacagaccccatggggttatgagaaggacttggtgcaggaaagcagcagcacgtgcctggcacagggcagggcctctccagatggcagttcctgtctgtgtcttattcccaccctccgggcacatggggggaactcagtttctccc

SEQ ID NO: 286 - DNA, 601 bp, Human
cctcagagaggcaaagaagtcccaagaggccgtcctgcctcagggctctcaggaaagagccgcccgcgtccctggctgggcttccttggtgcacccagctcatttctccttccctctctgtagaactcacattgtccccgtggaaatgccagccagctcccctttcccagtgcaggggggagccaggtgggcctgaggtgggccagttctgccgctaatgggtgagagacttgggccaggtgccttacatccgggagcctcagtttcctcacctcggaaatagggtgataatgtaacagaccccatggggttatgagaaggacttggtgcaggaaagcagcagcacgtgcctggcacagggcagggcctctccagatggcagttcctgtctgtgtcttattcccaccctccgggcacatggggggaactcagtttctccccactgcgcgtcaccctgggagaggtgttttttgtgccaattgccattttaaatccaaatcagcagggatcatgtttgctgttcaaccatgtggcatatttatagtgattttttttgtaatcatggtttttctttctggaatttcaagtttttcatttgtgc

SEQ ID NO: 287 - DNA, 601 bp, Human
tttcccccttattaagcagtgaaattatttacttttctccagtggtggggcagtgctaccaagttaagtaagcatctgtactctcctgtttatttggtcaggttttaaaaccatgtgtaaatgaccagtggtctctgcagtactatatattttcttaaattgtgggactctaatttttacaccgcttccttttttcttatttttattttcaagacaggttctcactctgtcacccaagctggagtgcagtgttgtgatcatggctcactgcagcctcaacctccagggctcaagtgattcytccaccttagcctcccaagtacctaggaacacaggcgcacaccaccactcacaactgactaatttttaaaattttttatacagacagggtcttgctgtgttgcccaggctgatcttgaattcctgggcacaggcgatcttcctgtcgtggcctcccaaagtgctgggattacaggcgttgagtcactgcgctcagcctgcctctcatttaaatgcaataagggcattaacttcctaagggaatcaaattgtaaatatattaaaagtggagattgcttggtatttgctcatcatgtgatta

SEQ ID NO: 288 - DNA, 601 bp, Human
cttttctccagtggtggggcagtgctaccaagttaagtaagcatctgtactctcctgtttatttggtcaggttttaaaaccatgtgtaaatgaccagtggtctctgcagtactatatattttcttaaattgtgggactctaatttttacaccgcttccttttttcttatttttattttcaagacaggttctcactctgtcacccaagctggagtgcagtgttgtgatcatggctcactgcagcctcaacctccagggctcaagtgattcttccaccttagcctcccaagtacctaggaacrcaggcgcacaccaccactcacaactgactaatttttaaaattttttatacagacagggtcttgctgtgttgcccaggctgatcttgaattcctgggcacaggcgatcttcctgtcgtggcctcccaaagtgctgggattacaggcgttgagtcactgcgctcagcctgcctctcatttaaatgcaataagggcattaacttcctaagggaatcaaattgtaaatatattaaaagtggagattgcttggtatttgctcatcatgtgattaatcatcccttactgtctccaccttataaaat

SEQ ID NO: 289 - DNA, 601 bp, Human
ggaagcaaaacgtctcccttaatcataaacagtgtctaccagtggaagcccatcgaccgagggatcagaggcctctcagtagtattgtttattgcagttccttggcaacattgcagagaggcagtcaggttctgaaatacaactgaggttattggcaggctgaggccctggcacaggcaccttctagaatatcagctagtgtcttggctttcctctggggggatcccgttgctgttgtgttacagaaatggtagttgtttactccaacagtctggatgaccgcatagaggaactatttcartagtgactgacatcattttttttttaacctcgtaaacctttcacagttcaggggccttggatcttattttgaagacaggtgcaaattggaaatagcatttgaatatgacccggcaaagcatgattgcttcttaagctcaagtatgagatctgttttgcaatcagcttgtccaagatggttatctcttcactgtcaaatcaaagtgctctgcatggtgtttagagattgggatggtgaggagagagcaagcctgggtatgtgcatgcatctgtttattctaggcttcgtgcctccaggagc

SEQ ID NO: 290 - DNA, 601 bp, Human
taactactgtgaaccaatacaaaaagatatgtataaacatgaataggcgtttggtattcattccatgaaatgctcaggcattgacagcgcttcaggttttgtttgctttttaacacaggctttgaggatagcacaggtcaggaaggctagggcgttggagcaggtttctcagcggtccaggctctaaactaaagctgtccctctcaaaagaatggaaatgatttcagattgtattcagcagcacgaagcaatgattcctaaatagttaaaaatctagaaagaaacactaagaattgtattkggctttgtagaagagaccccagaattttaggatttgggatgtatccctgcagtcaggcccagtccccagtgcacctgcagatctttgacagctgctggttgagcttctgctaagaggtttccttccagggactccatgttcactgcctcacaaaggcaggccagcctcatgctttagacatccttgctcttaacaaatctttcgtgttctgctacgtcagcctctgtgtgacacccattggaccttctctctgtagcacaattgcataccttgctctgttcttgataagataggtctagg

SEQ ID NO: 291 - DNA, 601 bp, Human
tcaaaagaatggaaatgatttcagattgtattcagcagcacgaagcaatgattcctaaatagttaaaaatctagaaagaaacactaagaattgtattgggctttgtagaagagaccccagaattttaggatttgggatgtatccctgcagtcaggcccagtccccagtgcacctgcagatctttgacagctgctggttgagcttctgctaagaggtttccttccagggactccatgttcactgcctcacaaaggcaggccagcctcatgctttagacatccttgctcttaacaaatctttygtgttctgctacgtcagcctctgtgtgacacccattggaccttctctctgtagcacaattgcataccttgctctgttcttgataagataggtctaggagtcatcgaagaggtgtgtctgttctagccagaacacctccaagtttcctgctgtcttccaggacttcattcccaggcccttgggcactgtggctgctctccctgcagctccctgtagcaccatgtccctctgaaatgacaagggtgccctctaggcatggaggaaaccagacgaaggactggggagctgcaccccacagcct

SEQ ID NO: 292 - DNA, 601 bp, Human
tgaaatggctcctgtggcaactggtattgtgtagagatggttcagtgtccacaccttgcagttgtcacattaagctgtgaaggacgactgactctagcactcagtggtcctcagtggcaggtgatgttgacctcagacaagagttgctcaggagataggctttgcagttcacctcgacaagcgtttgtggagagctaggtctgctacctcctgtatcgttgcctgtgggtgatggtaaggctcttgggggtgtggaagatgcggggatgatgatgatgacgatgatgacgatgacgacgaygacagcgtcgtcgtcgtcctggtcctggaaggataaagtcttgtggagaagaggaggcaattctgacagtttggggttgcatcatcttcttcacagaagagatgaagttgtgtaggcaccctaagtatggattgtcacaaaaagagcactaggaagcggggcggggcggggcaggggtggggggttcctggcagtgggaatgctgggcaggcatggcagtagggagcacctgctgcaggtggggttggtgaggtttcctcgtgggacttaggctgcagagagatcaagacaggcctcagc

SEQ ID NO: 293 - DNA, 601 bp, Human
gctgtgcttgaagttcttgttagccggagtatacagctgcattgagcaagatgttgtaaccaaaggagaggtggtggtgggccaggcaagcaggatcctgcacactcagggagctctgagggacggaaggagggtgccagaccttggacagatgtgagcctgggtggacagttcgcagtgggactccgaggaggccaagggcatgggtgacagcaggcagactgctcgggtggaatgggcatcagctgcagggaagccgggggaagaacagggcacaaatcagagttcagtgtgagacgcrgtgagtttgtgggtagcccagtaactgggaacttggaatggagcagttgggccgggagggccagggtgggagccgtgccgtgagaactggctgcctgcaagccgctgacacagccaggaagggcacgtggggcaagaggagaagtgggtctgggagggagccacatcctcaggccatttcccagaccagcctgcagtcagcaaaagcagagagctagtcatttcttcttattttatttttaattttttgttgttggagagctagtcatttcttgtaccaagctgcatttcagatgtgtgg

SEQ ID NO: 294 - DNA, 601 bp, Human
ctcagggagctctgagggacggaaggagggtgccagaccttggacagatgtgagcctgggtggacagttcgcagtgggactccgaggaggccaagggcatgggtgacagcaggcagactgctcgggtggaatgggcatcagctgcagggaagccgggggaagaacagggcacaaatcagagttcagtgtgagacgcagtgagtttgtgggtagcccagtaactgggaacttggaatggagcagttgggccgggagggccagggtgggagccgtgccgtgagaactggctgcctgcaagccrctgacacagccaggaagggcacgtggggcaagaggagaagtgggtctgggagggagccacatcctcaggccatttcccagaccagcctgcagtcagcaaaagcagagagctagtcatttcttcttattttatttttaattttttgttgttggagagctagtcatttcttgtaccaagctgcatttcagatgtgtgggtactactgccactggcatctgaggcatgctgcctgtatggctgggctggttgtggaaggcagagcttcccgcacaaagctgatggagagccccttctcccctg

SEQ ID NO: 295 - DNA, 601 bp, Human
tgccactggcatctgaggcatgctgcctgtatggctgggctggttgtggaaggcagagcttcccgcacaaagctgatggagagccccttctcccctgggcccaggcctctctaaactgcacttttggcctctgggtgtcttgtacaacatgaagacgacagcatttcttggtcacttgtaattaaaaaggaccttgggttggtctgtcctctgattgctaagattctatttctgtctaacatctacttttagtatcaatttgtacaaaaatctttgattcaccgaaagtagctgaagcagygaataaaacgttctcatacagtcaggagcactgtgggcttgggcacaaggtcaaggtcccaagagctcttggttggaaatctcctgccccaggtttttccatgtggcttgaccagcacctgcagcccaggacaggtccagctagaatccctgctccccaccctgctcccgcccctacttggtgatgagtagcctattttactccaccaaagtgaaccacatggaaaggcacacaggtcagggagaatttgtgaattacggaatttgccctgggagggcacatttgttttgcagattccag

SEQ ID NO: 296 - DNA, 601 bp, Human
cagagcttcccgcacaaagctgatggagagccccttctcccctgggcccaggcctctctaaactgcacttttggcctctgggtgtcttgtacaacatgaagacgacagcatttcttggtcacttgtaattaaaaaggaccttgggttggtctgtcctctgattgctaagattctatttctgtctaacatctacttttagtatcaatttgtacaaaaatctttgattcaccgaaagtagctgaagcagcgaataaaacgttctcatacagtcaggagcactgtgggcttgggcacaaggtcwaggtcccaagagctcttggttggaaatctcctgccccaggtttttccatgtggcttgaccagcacctgcagcccaggacaggtccagctagaatccctgctccccaccctgctcccgcccctacttggtgatgagtagcctattttactccaccaaagtgaaccacatggaaaggcacacaggtcagggagaatttgtgaattacggaatttgccctgggagggcacatttgttttgcagattccagcattgtcttttttaacattctgtctgaaagttgtgtgtgtactctctgttttg

SEQ ID NO: 297 - DNA, 601 bp, Human
ggcagcattgttcagtccatccctttccaagctcctcacagtttttttctccctgtaggtccttcggggtcgtcctctgggagatcgccacactggccgagcagccctaccagggcttgtccaacgagcaagtccttcgcttcgtcatggagggcggccttctggacaagccagacaactgtcctgacatgctgtacgtacttcctgggccctccgtgctcttctgagttctcttctcaaatacctgttttcttgggtcacaggagattaggagattaaagccattctctctggtcctgcrcctcccttgccaggcgtggctaagaggtttgtccttgtggaaggagctgagtgggttggtcgacctgtgcttttccgtgggtaccttaattctaccccatattccgtaatgctttcgttccgatttgcagttcacactgtagtttctcaggccaaatgtctctgtgaaatgtttggccagagtaatccatccttactcatcctctccatgtgaggtttttgtttctttttaaagaaggctacaacacaacacatactactctgaagtcgaattcaagagccccgcgccccacctgtggca

SEQ ID NO: 298 - DNA, 601 bp, Human
aggcatgagccatcgcacctggcaaccccacttattttgaaaaaacactttgcagcttttagtcctaagttttgtcagatgacgagagagagtttgtgatgcctcacagtgttggtgaggcctctctgctcagcgccccctggagaagccccccttttggtggaggacttgctctgtgtccgtggacggtgctgttttgtggctcagtggaggtcagagctgctggagcagggaggccttgttgtccttcctggaatgagtttgaggagggggtgaaggtgttccagttcagtcatcaggygcacaacaggtacaggttgggagcagtggccttgcttttgacatgcactttaaggcaggcttcagagattgatctggatctccatagctgaacaggaaggtgggctcccactagtatctcaagaccaattcaggagatttccagaaatgcttttcaggacaggtttggcttcattttggaaaggatcctgaggaattgctgggctgttatgtctgcatgaaggcacccagctcctatctctcacccatccacccccctggagccagcacagactcaggctgggcccacagtggcgggata

SEQ ID NO: 299 - DNA, 601 bp, Human
tgaagtatcctctcatgttcacaagtcccacccgtactcaagtgaggggattatatgggatatttacaccaggggcaacgatcttggggggcatcttagaattccatagtctcagaaatcattgtccctaatcaaacaatcaaggtgctatttttgtttcaaagcactttgagtgttgctacaaatactgaatccctaagctccttgtaaatggccggccagcggagggcatggggtggggaagactggatacacacccctgtgctctgggagtacgttggctgggcggcatgctcattarctgctgcttccgaacataggttcagctgaagtgtatcccaggcagtggacacttcgtgtggaattcagaaaggtggcgcaggaaggataccagggaaagccagagtgaaggcatcacccttgcacagctagcacatgtgggggctcccattgtcccatcaaggcagggccagaaccagaaagtcggctggtgccctgggcctgggccagtgatgggaggctcctcttctctgagggtggcacctacagatgcagtggcactgggtttcctggagccctcatcaaggaaacttcccagcat

SEQ ID NO: 300 - DNA, 601 bp, Human
ttttagccatttacatgaaaaccattcttagctcatagaccttggaaaactaggcagcaggccagattttacccacaggtacatagtttgcctgctgtgccctagagtaaaagatccaggacctgagcagaaggcacgacgtcctttctgaccaaacctcagaagtcacactgaggctctcaccttctccttcaggttacaccatgtgagagtcaatcacgtggggatgtgagctccaggacacaggggagaggaccactggggatccgggagcctggctaccccccagtaccccaccaaaacacacacacacacacacacacacacacacacacactgcccctcacaggtgaccatctgctccacactttgagcagcgcagccactgttttcttgccagccattatgagaaaaatcatgctttcaagtctgaatataagccatggagtaagaggtctgatgaccactgaatctgcataaaggtacagtgctagaatctaggctaatactagaactggtggtattttagcaagcttagaaacagcccatgaaagcaggtgtgagttctgcttctgtggtttagggtgggtgagggagagcg

SEQ ID NO: 301 - DNA, 601 bp, Human
cagcccctgccatgggaaacgcagggcacttcctgttctcagcatagagtgacaaggaaatttactcagagcggttactctgacattcaatgtttagttcaggaggcatttctgctttgccatcgagaatttttctcccttctaagaaaatgttttctcctgagaaaatttttctcccttccaagaaaagagtagaatgaaaggaggcaacttggtttcatagggagtgtcatgttgtccttctgagtttactgatgagcttacctgagaaaggagggttctagcatgggagttctgttgytacaagacatgaaagaatggcctccgtttatcccggagaggagagtccctgagcccttgggagttgccttgaaacctctgccgggtcccaggtgagaaagtgtgtgagttgtgtggttctgagatctgaacaggcaccatctggtgacactaggggctgaaggagctcggtggctgcaggtggactggagctcaccatcaggaagtagccagattctcacccctcagtgtcaccgagtgttctggctttagaggaaggactccgtggtccccaagccacaaggtgtcgaggtctgagtct

SEQ ID NO: 302 - DNA, 601 bp, Human
ttctaagaaaatgttttctcctgagaaaatttttctcccttccaagaaaagagtagaatgaaaggaggcaacttggtttcatagggagtgtcatgttgtccttctgagtttactgatgagcttacctgagaaaggagggttctagcatgggagttctgttgctacaagacatgaaagaatggcctccgtttatcccggagaggagagtccctgagcccttgggagttgccttgaaacctctgccgggtcccaggtgagaaagtgtgtgagttgtgtggttctgagatctgaacaggcaccrtctggtgacactaggggctgaaggagctcggtggctgcaggtggactggagctcaccatcaggaagtagccagattctcacccctcagtgtcaccgagtgttctggctttagaggaaggactccgtggtccccaagccacaaggtgtcgaggtctgagtctcaacgccatgactcagtgtgaattaacttagcaggtatcacaacatcagatttgggttgtggttccctgctgggtctgtactttagattgatgacaaagcccgtcctcagccttatttcagcccagatctcggtattta

SEQ ID NO: 303 - DNA, 601 bp, Human
actcagtgtgaattaacttagcaggtatcacaacatcagatttgggttgtggttccctgctgggtctgtactttagattgatgacaaagcccgtcctcagccttatttcagcccagatctcggtatttatgccacagatactgttgagctcctctgggtgcgtgctgaccctgaggtcacacagatgagccaggagtggccctggctttcaggaaacgtagtgacgtaaaaggtcccggctgctgcgggataagggccagggcagaggtgtgaacgcagccgtggaagacttgggccaggragccatttgttctgctgctaacacttccacagctccacgtgtccagactgttgccagagacgtctttggtctacaggattcaggagggaatctgaactttagcctggagcattatcaactcatagatgagtctgaaacaaacttagtgaaatctgatgttttttgtagttttccagtacagtttttcccatcgctggaatcctggtttggttctgcgggaatcgagtgcttgagtgggacccagacagacaggaagggcgctcctgctcagttagccccagtaagctcactgaggcacac

SEQ ID NO: 304 - DNA, 601 bp, Human
atttgggttgtggttccctgctgggtctgtactttagattgatgacaaagcccgtcctcagccttatttcagcccagatctcggtatttatgccacagatactgttgagctcctctgggtgcgtgctgaccctgaggtcacacagatgagccaggagtggccctggctttcaggaaacgtagtgacgtaaaaggtcccggctgctgcgggataagggccagggcagaggtgtgaacgcagccgtggaagacttgggccaggaagccatttgttctgctgctaacacttccacagctccacrtgtccagactgttgccagagacgtctttggtctacaggattcaggagggaatctgaactttagcctggagcattatcaactcatagatgagtctgaaacaaacttagtgaaatctgatgttttttgtagttttccagtacagtttttcccatcgctggaatcctggtttggttctgcgggaatcgagtgcttgagtgggacccagacagacaggaagggcgctcctgctcagttagccccagtaagctcactgaggcacacaggccccatgtccacagccgctcctggctgaggcgtggt

SEQ ID NO: 305 - DNA, 601 bp, Human
ggacagttaggtgagggagggtctcctggtggccccagggttactcttatttaggttgagaaaaattcctttttccaggatcgttggtgatcaaagtgtagtcattctgttgcgcagagaactccatcccagctccaccctcatgaattttgtaatcttggacaaattatttagtatcttagtgcttctgttccctcatctgtaacatgggggtatattatagtcagtagcacctgcttcacaaactcgtgaggacttcagcagttcacacacataactgcctcgctgcctggcacctagygtgcacatggcattctaccgtggggtagacttttaaaattctggctacagagatacttttccataaaagtggccacatggaactctccaaatctaagaagcatactgtgggggccttcatattttgtctaattcttttctccccagaacaggaacctgcacccttccttcttttaaagggcgacgtggtaaataaacatttttagacttgcaggccacagtctctgtcctaatgtcctcagctggtagttgtagctggaaagcagctgcagcccacatggaaatgagggagcgtggcccc

SEQ ID NO: 306 - DNA, 601 bp, Human
gaacaggaacctgcacccttccttcttttaaagggcgacgtggtaaataaacatttttagacttgcaggccacagtctctgtcctaatgtcctcagctggtagttgtagctggaaagcagctgcagcccacatggaaatgagggagcgtggccccatgccagtgcagctgatgtagaggcgggcagccccgggttaggccctgtggagacgcaggcccccgggctctagaacgctgaattctagtgaattctggatggctctccctcacacccaggcccaccctccctcaaggttgcaccwtctccacctgaaggaagctgccaggtggccataggagcccttctcttggcaggccagcttccaggcccagtggcttctcttacatcaggggcctccccttggaatgttccctgaaggccagacacgggcaggtagtctgtggtcaagcagccaccctgacaggaggctagatgccactgggtgtgctttgagtttcctagatgtggagagttctgtgtggccacttttatggaaaagcatctctttagccagaattttaaaataaagaggataacttcctggtgagaacagacgtggaaa

SEQ ID NO: 307 - DNA, 601 bp, Human
ttttaaaataaagaggataacttcctggtgagaacagacgtggaaaggaaggcactttggtttcacgctcatgtaagagagggctgttggcggtcactcctcagaactatggccagccctggatggtagccagctgctttttgccccaaaagtctgtttagctgggtctctgcattctggaagcttgtcaaagcccgggcctttcctgggtcagggcagccggctttccttgtccacgtgtggccggctgttttcttggggagccccggccacagccggcaggactccctttgctccatgygactctgagggcctcacaggtatttgcagcccaggtgctgtcggagcccagccgatgctaccgacacacagcacaagcgtcatcctgttctgcctgtcccttgcgtgtggaggggactcgtgcccagggctctccttgctggcttgttggaatctggcttcaggtctacacggggcctctcgtttggtccagaacagcctggctcatcggctggggcttgcttgtgcagggctggagcgagcacgtgctagatggagacagcagactcggagtgtgcatttcttcgtgttgcaagcctgg

SEQ ID NO: 308 - DNA, 601 bp, Human
gtttcacgctcatgtaagagagggctgttggcggtcactcctcagaactatggccagccctggatggtagccagctgctttttgccccaaaagtctgtttagctgggtctctgcattctggaagcttgtcaaagcccgggcctttcctgggtcagggcagccggctttccttgtccacgtgtggccggctgttttcttggggagccccggccacagccggcaggactccctttgctccatgtgactctgagggcctcacaggtatttgcagcccaggtgctgtcggagcccagccgatgckaccgacacacagcacaagcgtcatcctgttctgcctgtcccttgcgtgtggaggggactcgtgcccagggctctccttgctggcttgttggaatctggcttcaggtctacacggggcctctcgtttggtccagaacagcctggctcatcggctggggcttgcttgtgcagggctggagcgagcacgtgctagatggagacagcagactcggagtgtgcatttcttcgtgttgcaagcctggcctcacagtgccttcttcctttggttgtctgccaggggtagccctgcaccaggaggaag

SEQ ID NO: 309 - DNA, 601 bp, Human
ttggttgtctgccaggggtagccctgcaccaggaggaagcttagaaatagcacaggtgggaaccggagagagagcactgttggggaagctgcggtcactcatcagccttcctggtgagaaaccaggggtttcctgctaattctggaaaggatgtttcagcagtgcctgcatgagacgcctcagatagaaaactggttatttttgtttcttagcactgccaccatagataacagctgtcacgatggacagtgtggacctggattagtccttcttgggaaaggagagtttgggttttgtaccrtggtggttctgggttctgggggaagagaatggaaccgtacgaggtaaaacaggagactctgaaggccacttggccatccaggcagaaagccagggatggagaggggcagcagggctgtgttcagtgctcccgccgtacgcttgtatgcgggaaaccactgcaggcggcccatgaagcctcctggccatgtgcgccctcccggtttggaccccctcccgtgtgtcttggctgcaggtttgaactgatgcgcatgtgctggcagtataaccccaagatgaggccttccttcctggagatcat

SEQ ID NO: 310 - DNA, 601 bp, Human
tgccaggggtagccctgcaccaggaggaagcttagaaatagcacaggtgggaaccggagagagagcactgttggggaagctgcggtcactcatcagccttcctggtgagaaaccaggggtttcctgctaattctggaaaggatgtttcagcagtgcctgcatgagacgcctcagatagaaaactggttatttttgtttcttagcactgccaccatagataacagctgtcacgatggacagtgtggacctggattagtccttcttgggaaaggagagtttgggttttgtaccgtggtggttytgggttctgggggaagagaatggaaccgtacgaggtaaaacaggagactctgaaggccacttggccatccaggcagaaagccagggatggagaggggcagcagggctgtgttcagtgctcccgccgtacgcttgtatgcgggaaaccactgcaggcggcccatgaagcctcctggccatgtgcgccctcccggtttggaccccctcccgtgtgtcttggctgcaggtttgaactgatgcgcatgtgctggcagtataaccccaagatgaggccttccttcctggagatcatcagcagcat

SEQ ID NO: 311 - DNA, 601 bp, Human
agccctgcaccaggaggaagcttagaaatagcacaggtgggaaccggagagagagcactgttggggaagctgcggtcactcatcagccttcctggtgagaaaccaggggtttcctgctaattctggaaaggatgtttcagcagtgcctgcatgagacgcctcagatagaaaactggttatttttgtttcttagcactgccaccatagataacagctgtcacgatggacagtgtggacctggattagtccttcttgggaaaggagagtttgggttttgtaccgtggtggttctgggttctgrgggaagagaatggaaccgtacgaggtaaaacaggagactctgaaggccacttggccatccaggcagaaagccagggatggagaggggcagcagggctgtgttcagtgctcccgccgtacgcttgtatgcgggaaaccactgcaggcggcccatgaagcctcctggccatgtgcgccctcccggtttggaccccctcccgtgtgtcttggctgcaggtttgaactgatgcgcatgtgctggcagtataaccccaagatgaggccttccttcctggagatcatcagcagcatcaaagaggag

SEQ ID NO: 312 - DNA, 601 bp, Human
ttgtttcttagcactgccaccatagataacagctgtcacgatggacagtgtggacctggattagtccttcttgggaaaggagagtttgggttttgtaccgtggtggttctgggttctgggggaagagaatggaaccgtacgaggtaaaacaggagactctgaaggccacttggccatccaggcagaaagccagggatggagaggggcagcagggctgtgttcagtgctcccgccgtacgcttgtatgcgggaaaccactgcaggcggcccatgaagcctcctggccatgtgcgccctcccrgtttggaccccctcccgtgtgtcttggctgcaggtttgaactgatgcgcatgtgctggcagtataaccccaagatgaggccttccttcctggagatcatcagcagcatcaaagaggagatggagcctggcttccgggaggtctccttctactacagcgaggagaacaagctgcccgagccggaggagctggacctggagccagagaacatggagagcgtccccctggacccctcggcctcctcgtcctccctgccactgcccgacagacactcaggacacaaggccgagaacggccccgg

SEQ ID NO: 313 - DNA, 601 bp, Human
ctgtccctgtggccccatccaaccactgtacacacccgcctgacaccgtgggtcattacaaaaaaacacgtggagatggaaatttttacctttatctttcacctttctagggacatgaaatttacaaagggccatcgttcatccaaggctgttaccattttaacgctgcctaattttgccaaaatcctgaactttctccctcatcggcccggcgctgattcctcgtgtccggaggcatgggtgagcatggcagctggttgctccatttgagagacacgctggcgacacactccgtccatcygactgcccctgctgtgctgctcaaggccacaggcacacaggtctcattgcttctgactagattattatttgggggaactggacacaataggtctttctctcagtgaaggtggggagaagctgaaccggcttccctgccctgcctccccagccccctgcccaacccccaagaatctggtggccatgggccccgaagcagtctggcggacaggcttggagtcaaggggccccatgcctgcttctctcccagccccagctcccccgcccgcccccaaggacacagatgggaaggggtttccag

SEQ ID NO: 314 - DNA, 601 bp, Human
aaaattctgggaaaggacagttttataaatttataagctatcagatacattataatgctacttttaatttgcttttccttggaaatagctgtttggttatgtatgttttatagcctgttcactctcttttctctccaaataggtgactctgttttgagaagtgcaaccagatctctcctggaattcaacacaacagtgagctgtgaccagcaaggcacaaatcacagagtccagagcagcattgccttcctgtgtgggaaaaccctggtgagtccacacaggcacttgatgtatttctttaaaaaaaaaaaggtctgccccttggtgttctggctgtagaggtattccaggaagaatcagtgagcaaacttagaaacacaaataagaaaaaccctaccaaatgaccatcatcatcaagaaccaataagtaaacaaattctaaacttgttacaacttttaagtaaaacatagaccatgtcttttgtaaaactacaattcaaagtgattactgtgttaaaaatcagtgcactgtttaatgtttaagttataggcatactttttttttctctaaaacctcttcttctagcatttcattttgata

SEQ ID NO: 315 - DNA, 601 bp, Human
ccctaccaaatgaccatcatcatcaagaaccaataagtaaacaaattctaaacttgttacaacttttaagtaaaacatagaccatgtcttttgtaaaactacaattcaaagtgattactgtgttaaaaatcagtgcactgtttaatgtttaagttataggcatactttttttttctctaaaacctcttcttctagcatttcattttgataggttttagggcagcatatttagttttttaaaaaatatttttctttcctcatttatattaaattagagatacccacatctatttaggagaarccttggcccgtgggtatggggttctcaagttttttggatattacctggtgtttaaaggggacataattgtgtaaattattatgattgttcttattatgggcatattgtatgtaatttgttgattttaatctttagtttttggaaaggaacttgcagtaaataattgttttagctcttgggagaaggaattggtatacaaattctatgaatgttcttgaatcccagtaagaacccaatctttaggaaagtcaggttgagtgaaactctgtggctactaaattgctttaaaatatcatttta

SEQ ID NO: 316 - DNA, 601 bp, Human
ttaagtaaaacatagaccatgtcttttgtaaaactacaattcaaagtgattactgtgttaaaaatcagtgcactgtttaatgtttaagttataggcatactttttttttctctaaaacctcttcttctagcatttcattttgataggttttagggcagcatatttagttttttaaaaaatatttttctttcctcatttatattaaattagagatacccacatctatttaggagaagccttggcccgtgggtatggggttctcaagttttttggatattacctggtgtttaaaggggacatmattgtgtaaattattatgattgttcttattatgggcatattgtatgtaatttgttgattttaatctttagtttttggaaaggaacttgcagtaaataattgttttagctcttgggagaaggaattggtatacaaattctatgaatgttcttgaatcccagtaagaacccaatctttaggaaagtcaggttgagtgaaactctgtggctactaaattgctttaaaatatcattttagaatttgggactgtgactattgcatcttcaggtccacagtgtcttatctgaagaactttgaaaat

SEQ ID NO: 317 - DNA, 601 bp, Human
caacagtcctcatgtaagagagaagagataccgaaaagaacgcagaggagccaagacgtttattgacctttgcctgagttcgttattaggggacaccatagcatgatagtccctaaggaatggagagcagtgttgtgtgacattggtcataagcttttctgattgaccaagatgtatactgaagactcacttttttcttcctcccttccaggtgccatgctatgtgtttgatgaagagttgaggaagcatgatctcaatcctctgatcaagcttagtggtgcctacttggtggatgactcygatccggacacttctctattcatcaatgtttgtagagacataggtatgaatctttgtggggctgagggggtggtggtgagggatttcttctatggcttcaatatctttgcctttctacctttatttctgttttcacatccatgtttctgattaggccctctaataaagcttttgtccccaaaaatgttctatttgcacaacccacctcttctcccccagtagattccatgcctcctccccaacccctgtagattccatcctaactgttgatccattccatgtgggtgttctctcggccag

SEQ ID NO: 318 - DNA, 601 bp, Human
gcatgatagtccctaaggaatggagagcagtgttgtgtgacattggtcataagcttttctgattgaccaagatgtatactgaagactcacttttttcttcctcccttccaggtgccatgctatgtgtttgatgaagagttgaggaagcatgatctcaatcctctgatcaagcttagtggtgcctacttggtggatgactccgatccggacacttctctattcatcaatgtttgtagagacataggtatgaatctttgtggggctgagggggtggtggtgagggatttcttctatggcttcratatctttgcctttctacctttatttctgttttcacatccatgtttctgattaggccctctaataaagcttttgtccccaaaaatgttctatttgcacaacccacctcttctcccccagtagattccatgcctcctccccaacccctgtagattccatcctaactgttgatccattccatgtgggtgttctctcggccagacaccttgggtttcgggattctacagaagtgagggtcggtcttgttctctgtgtgtgcctgaatcccttggctctgagttacgggctgggtgaaaaagaa

SEQ ID NO: 319 - DNA, 601 bp, Human
tgttagagtattacatctttcttttgttctccaaggataacctttattgattttttggaaaaagactaatacagtctttgtcttaaatgggtctgtaactcaagtttggttatagagttgatgagttgtagattattgaattctggaataatacgctattttgatttggaaaacatttaggtttctggtctcttaacattttacagatcatctgaatttgctgagtattttcttacaagttttttctttccaatttattggcaatttgagtagagcttgaatgactttgattcacagtagrggtgccctagtttttactcagacattctccattcccaggaaattgccctaagtctcaaaccaagattgaatgtgaccctcaaaacctcttggatagtttcggacttgccatcatgtgcttacctccttgcatcctcagggcgcttgctgtgtattctgcctttggtataccaagtggattgtcttacactgagtccccatgagggcaaggagcctatggcacagcagatactataggtggaacaaagcagtccatttgtgaaatttcataattccacataatttcataattgtttggaag

SEQ ID NO: 320 - DNA, 601 bp, Human
tgcgggatgttctggacatattctgggtatgttttcatctttaatcctccaccaaacctgtgcagtagcacactggcaattggatagttttgtagttagaccaacgttatcgacatagtaagtggtcgatttaggatttgaacccagagctgtgggttctttccctaatctcctaattgttccagtcatctgtggagtgcctgcattttctagtctctgtagcttgaaaggggatagtgctaatgttgttgtacctcaagcagaggatgggtacatttcttgattacaaataacatcatarcctgtttcctgtgcacctcttatataccagtgcagagccagtactttacagtccttcatcctgagctttgtttgcagagggttaatggcttgcccaaggtttcagaatagttacttagggagacttttaggaattcaataatgtatttaaagggaccctgggtctaagggtacgtgtgattatcactcctaacacctaatctgatttaatgtaatacatgattttcagacacactacgagacccaggttcacagctgcgggcctgtccccccggcactgccgcctgcctggtaagaggac

SEQ ID NO: 321 - DNA, 601 bp, Human
agccagtactttacagtccttcatcctgagctttgtttgcagagggttaatggcttgcccaaggtttcagaatagttacttagggagacttttaggaattcaataatgtatttaaagggaccctgggtctaagggtacgtgtgattatcactcctaacacctaatctgatttaatgtaatacatgattttcagacacactacgagacccaggttcacagctgcgggcctgtccccccggcactgccgcctgcctggtaagaggacaccaggcgtttgatgttggccagccccgggacggastgaagctggtgcgcaaggacaggtcagtcaaggcctccgatgctgttggcgtttttaatctccagcaaggacctgactttcagggagctgcaggaacatcctttttcagcaaggcttgggatagtccctgcagcattactgcttcacatgtacttgtaagattgttggtcattgctgtgagtcacatagtctagtgtgcttgtctactttttaatcatttgtctcttacagcagtaaaaatacatctcatgatccagtccatagtacatacctgtatttgcctcatgaaataatgcctat

SEQ ID NO: 322 - DNA, 601 bp, Human
gtgtgattatcactcctaacacctaatctgatttaatgtaatacatgattttcagacacactacgagacccaggttcacagctgcgggcctgtccccccggcactgccgcctgcctggtaagaggacaccaggcgtttgatgttggccagccccgggacggagtgaagctggtgcgcaaggacaggtcagtcaaggcctccgatgctgttggcgtttttaatctccagcaaggacctgactttcagggagctgcaggaacatcctttttcagcaaggcttgggatagtccctgcagcattrctgcttcacatgtacttgtaagattgttggtcattgctgtgagtcacatagtctagtgtgcttgtctactttttaatcatttgtctcttacagcagtaaaaatacatctcatgatccagtccatagtacatacctgtatttgcctcatgaaataatgcctatcttaaggtgccatctgatatttttcattctgtggcacccgtgaaattgattttgtgtccattgtgttctcatcttgggagggcaagagacaggagggacagtttgctggtgaccttcactgggatgtgacagggacct

SEQ ID NO: 323 - DNA, 601 bp, Human
aacttgttctctgagcggcgagcagcaggatgtctccatagacctcacaccacttgcccagagcggaggtaagcaggtgctttctgcctcctggcgctgcttaggaagaaggggatcgagagagggaacgggacagtaggggccaagtcagtccatgcatgcttctgggttggagagagctgtagtttgggctggtgtttcagaaataggattcaggtttgactaagtaagactgtaatcttctaatacctattcatataaaacaagcctcttcttgttaatttccctgtttttaggttcrtcctatatttcagatggaaaagaatatttgttttatttgaatgtctgtggagaaactgaaatacagttctgtaataaaaaacaagctgcagtttgccaagtgaaaaagagcgatacctctcaagtcaaagcagcaggaagataccacaatcagaccctccggtacgtcaacaacctctgtgcgattttcctttttctttgtatttcttgagatagggttgcactctggcgcccaggctagactgcagtggtgcaatctcggtgcattgcagccttgacttccctgcctcaagtaattctc

SEQ ID NO: 324 - DNA, 601 bp, Human
acactttccccacccccactgccccagtggacacacacacatcctgtttgtgttttcctcggttttctctgtttgttttgggaatgggcccagcaatgagcttgttgggaaagttttcatcttgaattttggtgcacactaaactacagcaaggacagattcggcaggggcgggatggcttgtcaattttgattgagtgacctcttcttttatgtaatgagtatcaagataatcctttttgcaaagtggtgaccctatggtagagtttggatctggggattgcagaatgtcactgggtgcrttgaagctgaaggcgtgcatttctctgagtaatgagaagcacccttgagtcaccaaggcactggcatatcaaaaagcggtgccgctgtccatatcttgacgattgtagacacagttgtagctgtagagagatgatgggattccgtcatcatcagagacctgccccatctgttgacccccaggctgtgactccaggcaccctgcagggcatcccaccactgctcagagcaattctagggcccattctggtttccagcctaagtgctgccccacccagagggtctttctggcccttgcttcc

SEQ ID NO: 325 - DNA, 601 bp, Human
aagtggtgaccctatggtagagtttggatctggggattgcagaatgtcactgggtgcgttgaagctgaaggcgtgcatttctctgagtaatgagaagcacccttgagtcaccaaggcactggcatatcaaaaagcggtgccgctgtccatatcttgacgattgtagacacagttgtagctgtagagagatgatgggattccgtcatcatcagagacctgccccatctgttgacccccaggctgtgactccaggcaccctgcagggcatcccaccactgctcagagcaattctagggcccattctggtttccagcctaagtgctgccccacccagagggtctttctggcccttgcttccgtgtgttctgtgtgtttttctacagcagagctttgggtggcttggttacaggatgggttgctacaggattcactgtgggatgagggagaggcagctggacatgatgtgaaccatgctctcgaagcctccggagatcaggtctgcgttgggagagacaggcacccctgccctggtagcaccgcacccctgcgaacgtcctagcaagcaggcaaagaaccagcccagggtcttgccactgggaag

SEQ ID NO: 326 - DNA, 601 bp, Human
gcagagctaatcctaacattgctgatgagtggacagaaaccataggcctcatgaatagtgatttctgaagtcaaagcccagtatgcttaaatatcaacccaagtggtttgggagaggggagcacagcttactgttctgctaaaattctttgaggaattaagtaagaatacgtgtaaggtacgtagcaatggttatttacaaaatggactctgcctgcagattattagtatgtctcagatgtaaaaccagctcaaaagtactaggacgatttgtagtagtatttaattatttgtaaacttasacgtttttcttcacgtttgcagaatacaaatctttgtcagtagtgaaatgtgaatctagtaggattaaactgtgtgtaaaccttgtgggcgggatgaagagaggcagaggcgcgtcactgttgctgttagttgaccggcaagctcaggggcccagctatggtagctgcctctgggttgtcagctgcgcccaggaggtgaaggtggaaggcattccttaaagacagtggcttagtgtacttattaaaaaccaaaccaaaccagccaaccaaacaaacaaaaaacacaggagagaaaaccaa

SEQ ID NO: 327 - DNA, 601 bp, Human
attccttaaagacagtggcttagtgtacttattaaaaaccaaaccaaaccagccaaccaaacaaacaaaaaacacaggagagaaaaccaaagaaaaaaagaaaaatagaaaaaaccccacagtagagtggggcaatcttgccttgtggttatgagcacggatgagggcagaccctcagggtctgattcccagctgccctagtttttagttatgaaaccataagcaaattatttagccaccctaaatctgcaaaatggtgctaaaattgtacctttgccatggggttttgaggatcaaatasattaatatagtcatgtgttgcttaacaataggaatatgttctgagaaatgtgtcattaggcgattttgtcattgtgtgaacatcatagagtgtacttaacacacacctagatggtatagcctgctgcacacctaagctatatggtgtagcctattggctcctgggctacaagtgtgtatagcatgtgagtgtactgaatactgcatgcacttgtaacacaacggtaagtatttgagtatctaaatatatctaaacatagaaaaggtccactaaaaatacgatactataatcttttgaggc

SEQ ID NO: 328 - DNA, 601 bp, Human
ggggttttgaggatcaaatacattaatatagtcatgtgttgcttaacaataggaatatgttctgagaaatgtgtcattaggcgattttgtcattgtgtgaacatcatagagtgtacttaacacacacctagatggtatagcctgctgcacacctaagctatatggtgtagcctattggctcctgggctacaagtgtgtatagcatgtgagtgtactgaatactgcatgcacttgtaacacaacggtaagtatttgagtatctaaatatatctaaacatagaaaaggtccactaaaaatacratactataatcttttgaggctaccgttttatatgcagtctgttgttgaccaaatgttgttatgcagcacgtaactgtataaagaaagtacttaaacagagcctgttcttctgcagcttgcctttatgtagccgaggtgctgagctcagtgcctggctgagattgtgctcactacaggtttgccgctgtggctggtattataattatagtgatgataatattaaagattggatagaaattacaattgaaatatcatttgctcttggtacagaatcttacttcctgttttcttagatcatta

SEQ ID NO: 329 - DNA, 601 bp, Human
gtgcagggataggatttccagcaaggagcaagtcagcaaagcctctgaatctcagcgtccatgggatggggacgtggcctgtgaagagctggttttcagacttaggcctgaactattcctgctgatggatgggaaatctgggtggctcactcttggtggaagaagaggcttgatttgaggagggtgttacagacaggtgcactgacggaaccacagaatttcagcactgtttggagttgtgctgctaacattgtggggctggcataggaccttggcgtgcttcactgggagcgactgactrtagatggcttccactcttgttttactttagggatgagtcccagagaacttgtcttgttcacagtcgcatcactaagtcagcagtgcacagggaactagagctccatttctgtcctcctttctgtgagtccccagtgtcacccagagatgttcaggagcctctgggagctgaccacagcccgggagcagaggatcccactcactgctcttgcgttcctcctgcctgcccttttaatcttatctttggaggtgctgtacacagccttctgtcaatgtctcccaaggtgaaaggcatgctggc

SEQ ID NO: 330 - DNA, 601 bp, Human
attgtggggctggcataggaccttggcgtgcttcactgggagcgactgactatagatggcttccactcttgttttactttagggatgagtcccagagaacttgtcttgttcacagtcgcatcactaagtcagcagtgcacagggaactagagctccatttctgtcctcctttctgtgagtccccagtgtcacccagagatgttcaggagcctctgggagctgaccacagcccgggagcagaggatcccactcactgctcttgcgttcctcctgcctgcccttttaatcttatctttggagrtgctgtacacagccttctgtcaatgtctcccaaggtgaaaggcatgctggcctgccatcgaggacttagggttaagcatctgaagcttaatagaagcctgtgtcaactcagatccccatggtctctaaaaaaacctggacctgaattttttaacggagcagttggcattggtcctgttcagtttcttccttgctccttagctgttcctcaattttggtcacgtatggagtttaaatttctcctcttgaattgtgcaggtaacgatgggaaaggaactcctgtattcacaggggaggttga

SEQ ID NO: 331 - DNA, 601 bp, Human
cttgtggagtgtttgagaacctgcctcactgtgaaccgcctgggcagggagtgctggcagtgctgttgtggttaaacaccctgtgtgctgctgggaacggtgccatagttaattctggcacatgtgtgctagtgaagacattggttttctgtgaagtggaaagagttctagctgcagagttggagacctggctgaggactggtgttgccgcatccaaccacatttgcttgagcgagctgctctccaggcccgggtttcttacggtgaactgggtggtgctgttagattccttaagttaactttttttttttttaaacattactgtgtataagagacaacctaggatctatgagataaggagagatacatttttcaatctgcagacttcctgacatagctctggtttcttggaatctgcagtatttcgtggtatttgtgcgtagatagccctaagtaaattatgaagggagagctaaaaccattccttactgcttgaagaagtcccttaagactttacagcccacctggctccaccccagacttccagtgtttagggcaggtccttgttcacatgcacagtcttgtatggtttcttttaggc

SEQ ID NO: 332 - DNA, 601 bp, Human
gagaaacctgagaatctcggtgaatttttgtgctttcagtctgcccgggttccagaaacagcgctggggattgagtgacgaagtggtttgggaactttgagcccttgacttttggcttaatcactatttattctgtgactcagagaaatcagcattgcttttggctaaaatacacttttgttttgttacagaaccagagcagaattgggaagctgtggatggcagtcagacggaaacagagaagaagcattttttcattaatatttgtcacagagtgctgcaggaaggcaaggcacgaggrtgtcccgaggacgcggcagtgtgtgcagtgggtgagttgtgcctggatggaagatctaggtgatgcttttctagggcatccagtttggaatgagttagaagatctttctgtggttcatctaagcctcctctttctataatcacatgaaggatggtaaaaatttttcattcataactcaaatgtcagtaattgcttgatgcactctggaatcctgaagttggctagagctccctgacatgggctaaagccataactgggaacagaaggaaccacgtggaaaatactacatcatctttttag

SEQ ID NO: 333 - DNA, 601 bp, Human
tgtctttactaagaaggactttggaacagagttttaatcctttataacaaaaagcaagtgaaccaagaagtaagcggcctcctgcttgggttgctaaacaggtttcgttaatttctgctttggatatgagacacattctcaccctttggctgtgtggctgtgctttcaaaagactttgtgtcttggggtagctgaagccctgacagtaggggacaatgtcagtttacagttggtgctgatgcatgttgcaagccatttggtctttcttgccctggaagggcattgtgcatccttcatggcrctttctggctgaacctatggatgaccctggaggaccccaatgtggctgttaatgtctagccaaacgtggcactctagggaaacccatccgctgccttggtgggttcagggggctggagaagggctgcacttgctgggtttgggctgatttctttctttctttctctttctttcttttttttttaagtcacttctttgcgtgatgatcatttttaaccacatcttctgttttctccccctttctcttccagataaaaatggaagtaaaaatctgggaaaatttatttcctctcccatgaaa

SEQ ID NO: 334 - DNA, 601 bp, Human
ggttctggtgactcctcacgtcgctcacgggccctcccttcagtgtggcagccttggagtgcttctgcccctcaggtctttgctgagagaaacgtgtgtttatttcagtgatgagaagacttggaacttgggtctgagtaatgcgaagctttcatattatgatgggatgatccaactgaactacagaggcggcacgccctataacaatgaaagacacacaccgagagctacgctcatcacctttctctgtgatcgagacgcgggagtgggcttccctgaatatcaggtaggaatgtttgtycctcatcgcgctccctgaggatactcatgcctgtggtgggcctttcatttaagcagagcttgtatcagtctgggtttccagccaaatcatcaccgtcattagatttgccagggtgcctgggcagtattagtattttaagctgtttatttagtgggttgtgcaccttaataacagcccacaagcctgtcagttttgggtacaaaacatacaaaagcataaaaaaaaatcctgaattaacccccacttagcagaggctaaattttcatcctgatttgttactggacagtcttctttttaata

SEQ ID NO: 335 - DNA, 601 bp, Human
cctccgcgcatctgccgtggattaggaagaggataactccacctacaacttccggtggtacaccagctatgcctgcccggaggagcccctggaatgcgtagtgaccgacccctccacgctggagcagtacgacctctccaggtgaggcagagtcagctgctctgtttttggcctggtacagatgctgaggttgcaagtgttgctggtgagcgtgtgactgagctgatgatggggagtgatgctggctgtggggctgcaggaccaaggtggggcattttcagcagagtgaattctaataacwgtctggtcgcctttgggatagcaaccagtcttggccacagcagagcctcggcctttagcttcatcatttaaaacaatgactgtcagtgcagaggcacgggggacagttaaggtccactgcatactgagttcagcgaaggtggagtgtaatcctggtgcgtcatgcgcccagacaagccaactcctggtagtgtgattggtggagcatgttttatttggtagctttacttccccaactacatagaaataaatgagactgaaatgtgtaagctctttaaaagcatatacattttgctttgaa

SEQ ID NO: 336 - DNA, 601 bp, Human
tccggtggtacaccagctatgcctgcccggaggagcccctggaatgcgtagtgaccgacccctccacgctggagcagtacgacctctccaggtgaggcagagtcagctgctctgtttttggcctggtacagatgctgaggttgcaagtgttgctggtgagcgtgtgactgagctgatgatggggagtgatgctggctgtggggctgcaggaccaaggtggggcattttcagcagagtgaattctaataacagtctggtcgcctttgggatagcaaccagtcttggccacagcagagcctcrgcctttagcttcatcatttaaaacaatgactgtcagtgcagaggcacgggggacagttaaggtccactgcatactgagttcagcgaaggtggagtgtaatcctggtgcgtcatgcgcccagacaagccaactcctggtagtgtgattggtggagcatgttttatttggtagctttacttccccaactacatagaaataaatgagactgaaatgtgtaagctctttaaaagcatatacattttgctttgaaattttagtctggcaaaatctgaaggtggccttggaggaaactggtatgcc

SEQ ID NO: 337 - DNA, 601 bp, Human
ctgagcgttgccttatgtgtctcttaacagcagcagtcttggggtgggtggcggagctaggccagtcttagttctgcttaaggtcagtgtgcggtatatatgttcacaggcagggagtgatttgtggtaccttcatggctgcgatttctgaagtgtaagcctcatcttttgctgcggagtttgaggctctggtgacatacactgtttcctggattttttttctgagtcgtacagacattatcttgcctcttagttcttgtgagttgaggatcgtggcagtggaacggggcttagagatagkttggtcctgtaggggccaagggaaagcttccctttcaccctttgaagtttccctgaaaatcagctgtcaacaggagaaaagacattaaaattttgacgtgcatagcaccggggaataaatagcaggagaaagatgacccagtagcctaatgcaacacagaaggttatgtaccctatttcacaggggagagggagataggggatgtagacagttcttttgacggggcagcaaatgattatttgggagaaagaatggacagaaattaacttgcaaatgattctctttggagcctgaatgagg

SEQ ID NO: 338 - DNA, 601 bp, Human
tggacgctgcgtcactcacctgcctggtctgctttgtcattggctaacactctttttcctgagagacacttcctttagagttgaagatctcggtgatcagggaatgaatgacgggcaggctgagcttggcccatgctctctgcgggaggtgttctacccaggttgtacacactctccttgggttcacctgagcttgggccgcccacttcttctctcagtctcaggaaggatccaggtttggtgttccacggggagatgcctaggttgcccagttcagcctgctggtctgtttttgggcacrtctgtgcattccctgcctgtggactgccccctccttctctggtttcttgttgccattgagacactgggtagttccagaaagttcttggacccttggttttccagcttttctgtgataccatatttagtttacagggtagcttcacattgttgtcgtgtctctcagcactcatatagggcctgcagcacaggaaatacactcactgaaggaagaaagggccgctctcccaggggtttgcagtcacagaactttcacaggctaaagctcagtccctttcacaagcacattgtgaagtggaag

SEQ ID NO: 339 - DNA, 601 bp, Human
ttgacggccaagggtgtggactcagtgttagtggctgttgttcctgaacccgtgaccctgggcaggtgtcttaacttccttgtgcctcagttttctcatttgtaggctgtgtttgtgggtcactgtgaggcgcagttgagaaatactaacaaaactcatagtgcagtcctggtgtgtgataaacactccctgatcggcagctaccattgcctgtgtggtggtggtgctctcacaaagctaatggctctttgggggagctttttatggaaacatacacaccgaagggcacacagatgataaygtgacacagctgggtgagtgtccataaactacacatcaagaaagaacatgcttccccctaggagccctcctgtgccctcttcctgccactgctgagcatcctcctgacctctgacagcgcaggccattgttgcccaatcctgagctgatgtcagtgaatcctacgtaccgttgcctttgtgtatggcttcttgcattcaactttttgtgtagggtacttttcagaaccttgagctcagacctaggtttggatctgaattctaccatttactgctggcacgatttctatatttctgaatat

SEQ ID NO: 340 - DNA, 601 bp, Human
cttttaatgcccatttatagctggtatttacctaaccaaaaattgtaaaagtttttttttttttttttgagaccgagttttgctctgttgccaggctggagtgtaatggcgccatctcggctcactgcaacctctgcctcttgggttcaagtgattctcctgcctcagcctcctgagtagctgggactacagggtgcctgccaccatgcccagctaatttttgtatttttagtagagacggggtttcaccatgttggccaggatggtctagatctcttgacctagtaatccacccgcctcrgcctcccaaagtgctgggattacaggcgtgagccactgcgcccggccatttgtaaagctttttgcttgaaaatgtgaatgcgtgtgtggttgcagttgcccttcacttcttccatgttcttgaaggggacaactgtgaggtgaaagacccaaggcatggcaacttgtatgacctgaagcccctgggcctcaacgacaccatcgtgagcgctggcgaatacacttattacttccgggtctgtgggaagctttcctcagacgtctgccccacaagtgacaagtccaaggtggtctcctcatg

SEQ ID NO: 341 - DNA, 601 bp, Human
tacctaaccaaaaattgtaaaagtttttttttttttttttgagaccgagttttgctctgttgccaggctggagtgtaatggcgccatctcggctcactgcaacctctgcctcttgggttcaagtgattctcctgcctcagcctcctgagtagctgggactacagggtgcctgccaccatgcccagctaatttttgtatttttagtagagacggggtttcaccatgttggccaggatggtctagatctcttgacctagtaatccacccgcctcggcctcccaaagtgctgggattacaggcrtgagccactgcgcccggccatttgtaaagctttttgcttgaaaatgtgaatgcgtgtgtggttgcagttgcccttcacttcttccatgttcttgaaggggacaactgtgaggtgaaagacccaaggcatggcaacttgtatgacctgaagcccctgggcctcaacgacaccatcgtgagcgctggcgaatacacttattacttccgggtctgtgggaagctttcctcagacgtctgccccacaagtgacaagtccaaggtggtctcctcatgtcaggaaaagcgggaaccgcagggattt

SEQ ID NO: 342 - DNA, 601 bp, Human
gtgtttgcagtgagtgtatcacaggccagcactggtgagagggggcctcctcgtggggtggtggttgtagtgagtgtatcacaggctggcactggtgagagagggcctcctcgtggggtggtgtttgctgtgagtgtatcacaggccagcactggtgagagaggtcctcctcgtggggtggtggttgtagtgagtgtatcgaaggctggcactggtgagagaggacctcctcatggggtggtggttgcaatgaatgtattgaaagctggcactggtgagagagggcctcctcgtgggatgstgtttgcagtgagtgtattgaaggctggcactggtgagagagggcctcttcatggggtggtggcttgtcatgagtttatcagggaagatcaagtaggatggggattctttggaggcgctttactctctgcagcatggacgtggttcggccgagaaacagcaggacgaagaatgatttaagggtgttaacagttgatccctagtatggcccagggtaaatcagtgctgaggactgctgggaacatgataaccctttctgaacatgaggagatgaagatataatagatagaaataatagcca

SEQ ID NO: 343 - DNA, 601 bp, Human
cagcatggacgtggttcggccgagaaacagcaggacgaagaatgatttaagggtgttaacagttgatccctagtatggcccagggtaaatcagtgctgaggactgctgggaacatgataaccctttctgaacatgaggagatgaagatataatagatagaaataatagccatggtgaggaatccttcttagcaggtagaagatggggggtgtgacgtggaggtcttggtgtgtgcctgcgtatgttgagagttgtatggtcggtccttttgtgatgcagggacagctcactcaaacctgcrgtggttggctgagactggatgtcagctgtacatgggaaaccaagggcacctccagggatcttggtaccactcatggcccctcggaaccctgaagatgaaactcatcccatgttcgtggagtttcatacagccccacctgtatcttgggtggctcacctcaaaggcggtgtggttatttttagctgcagaaggtggttccatcctctgtgtggtttgaggctgtggttccacttccccttgctgcgttgtgctgtgcagacttcgacagtggctgtacccctgtggcatgggactagttct

SEQ ID NO: 344 - DNA, 601 bp, Human
gtcacaggtagcgctgccacttcccagccacataacttggttaattactcaggtagtctgccctgctcagccgttcataacatgaggcatacttgtcctgcccattgcagggtttcgagagaagaggtaggaagtgccaggtgtcatttctgacacacgggagatgcacagtcagtgagcatgagtgcctgtgatcagttcttcccttacttgtttggcatgcacgtaagcaggtgtcgactgcatacaggtttttctgtgtgtgagattgtggtgagccccagtgctagcgtgcatgacragctcggtggctgagttgggcattaactcgggcaagaccagctcgctgggtgtcagggtggctcgccccatgctctccagcggtgggcagcagtggtaggggagcttgggatggggggctccaggagcttcaggcctgccctcttgcctggagcggcagggaagtttcctcttgggaagattgtgcagaggcttagtccagactcatgagctgctggggcctctgagcattctcctctgtgacctgagaggctcatggccgaggacaaaagggctgccccacatgtggggggcaaaggtg

SEQ ID NO: 345 - DNA, 601 bp, Human
ggccgaggacaaaagggctgccccacatgtggggggcaaaggtgagagggtgtgtggggcccctgtgcccagggcccagaaggctgggagggaagggtgaaggggtgtgtggggttccccatgtccagagcccaggaggctgggagggaaggatgagggtggtgtgtgggggcctctgtgcccaggacccaggaggctgggagggaaaggtgaagggtgtgtggaggccctgtgccccagacccaggaggctgggagggaagggtgggggtgtgtcgaggcccctgtgcccagggcccagkaggctgggagggaagggtgggggtgtgtcgaggcccctgtgcccagggcctgggaggctggactgcagcgtggcttatcagggtgcccagcaggaatcatggggtttacctgggaaggaaggtgctgctgaactcatcatgctaactctgcagtggacatgaagcgttttgagatgagcagagtaagccttggctggtgccagtgggaggatgcgtggaatgggctagttctcttggtatatctttttgttttgactgtgataatggattttacctcatttggtttttagaattttatca

SEQ ID NO: 346 - DNA, 601 bp, Human
gccccacatgtggggggcaaaggtgagagggtgtgtggggcccctgtgcccagggcccagaaggctgggagggaagggtgaaggggtgtgtggggttccccatgtccagagcccaggaggctgggagggaaggatgagggtggtgtgtgggggcctctgtgcccaggacccaggaggctgggagggaaaggtgaagggtgtgtggaggccctgtgccccagacccaggaggctgggagggaagggtgggggtgtgtcgaggcccctgtgcccagggcccaggaggctgggagggaagggtcggggtgtgtcgaggcccctgtgcccagggcctgggaggctggactgcagcgtggcttatcagggtgcccagcaggaatcatggggtttacctgggaaggaaggtgctgctgaactcatcatgctaactctgcagtggacatgaagcgttttgagatgagcagagtaagccttggctggtgccagtgggaggatgcgtggaatgggctagttctcttggtatatctttttgttttgactgtgataatggattttacctcatttggtttttagaattttatcaatgatttacacatttgtgt

SEQ ID NO: 347 - DNA, 601 bp, Human
tggggggcaaaggtgagagggtgtgtggggcccctgtgcccagggcccagaaggctgggagggaagggtgaaggggtgtgtggggttccccatgtccagagcccaggaggctgggagggaaggatgagggtggtgtgtgggggcctctgtgcccaggacccaggaggctgggagggaaaggtgaagggtgtgtggaggccctgtgccccagacccaggaggctgggagggaagggtgggggtgtgtcgaggcccctgtgcccagggcccaggaggctgggagggaagggtgggggtgtgtsgaggcccctgtgcccagggcctgggaggctggactgcagcgtggcttatcagggtgcccagcaggaatcatggggtttacctgggaaggaaggtgctgctgaactcatcatgctaactctgcagtggacatgaagcgttttgagatgagcagagtaagccttggctggtgccagtgggaggatgcgtggaatgggctagttctcttggtatatctttttgttttgactgtgataatggattttacctcatttggtttttagaattttatcaatgatttacacatttgtgtctccctgtag

SEQ ID NO: 348 - DNA, 601 bp, Human
ctccgcctttcccttgtggtgcaggggcctgctttggacagaccaggattagcgtgggcaaggccaacaagaggctgagatacgtggaccaggtcctgcagctggtgtacaaggatgggtccccttgtccctccaaatccggcctgagctataagagtgtgatcagtttcgtgtgcaggcctgaggccgggccaaccaataggcccatgctcatctccctggacaagcagacatgcactctcttcttctcctggcacacgccgctggcctgcgagcaagcggtgagttttcagatgggcaygggagaagtgcatgtccagtgcctggctgcacccgggccccttcgtcaggttcacttgcccactagtagatgcccagctgaactgtccactcctgatcaccccaataataaagttgactggaagtgcccagtgctatgtaatgaagcattttgacacctttctactttttttgttgttgttattcagcttttaaattcttatggatgacctagtggtgattaggaaaatttttttgtagactcaaagcagtctttcctacttaacagaccgaatgttccgtgaggaatggaagctctatt

SEQ ID NO: 349 - DNA, 601 bp, Human
ctttctgacagcgcagaccggggatcctcgatcgggaatcattgcctggccacccattgtcaaatgttaaaagatgtagaaagttatttaactggagaaggtgtggtgccacgtggtctgaacgtgccccacagtggtgaatgaagagcactgtagctgagaacaaaatcatggggaagctgcttatacacacactcacacccacatgcacacacacgtgcatgcacacacacattcatcacatacacagttcctggccattcacctttatttactttttaaaaataaaaaaagagttttktgttttttttctcataatactcagactggtcttttatttatttgtttattcactcaaaaatatctcttgggcagccgctgtgtgccaggtgctgtgctaagcaatgaaaatgaacagtgaacacctcctgtcccctctcccaaggacatagccagtggttactgctgggccacgtcagtgggcagtcccggggcagcactgggcagtgagggtggcaggtcagcatggaggttccggccttcccctgtcaggtggtgggaggaccgtgtagcatccttagaggtttttcaggttccgggc

SEQ ID NO: 350 - DNA, 601 bp, Human
ctgaaaacttggggctcctttgacatgaatggactgaggctatttatggtgtggatttgtcccacctaatgtggatattgatacatctagctgcagaaatattaatatgtttgatcacaggatctgggggtgtgagaattgcctcttaaaatcctaataaagatgttggattccaaggctcatctgacccctaggagttcaggtgatggattaggatctgttgggtgtcttgtaattctgataaagacatccttctgatgtttgggcctggagcaggtttgtaaagggactgttagacatrggtgtgctgacagtgacagaaagtgacctggcagccgcctgaccagtgagagagacagtatttgagaaggaggaggaaacagtcctgctgtttggggctactccacaggggcccagagcacctcaaagcccttggatgtgttcatgaatcttagagtgtagtgacagtcctagttagtaaggaaaggcagagctgtattcagtccacccattgcatctgtttataagcgtattggcatatttttataggggtgtctgggtgtgcctctgtagatgcacacagcatggggcaacgtggatt

SEQ ID NO: 351 - DNA, 601 bp, Human
ggtgccaggtgctgtgaggctgctgggagtgttttggataatgtggtacctgtgagctgagagggtgtatgtggccactgggcagcatcttggtgctctcgtagggcatgccaggtctcaggaaggttcttggattgcgtggccaactcagcgcagctgacacttgcgttgtacctcatggctctgcacttaacgctttttgatgataagtaacctcatgaggcgggtagtgggaccctttgtatcagacagagggcaggtggggcagcccggagacatgaatgtaaggtatccatggggrcagggccagctcctgggtggctgaaatctacagggatttaattcctccaacctggttgaagatgatcaaggcagttgtttgctgattgtggcagctttgggaagagggaggtaggaggtgccctggaattgagaggcacttgggcatgtgcctccatgccatgccagagccctggcgtgtgctgattctttgggctgctggtcttactgatgtggtgtcgtggtcactggtgcctgggggcccctgactccctaagcctagatatctagatgttaccatgccagtgcctggactggggta

SEQ ID NO: 352 - DNA, 601 bp, Human
gccccagaagggggaaggagggaaggtcgtggagggttgctttttcccctgtaatcttgcagtatatatggatattcgactagtctttccccaacttcagccaactgaaatgactaaaacacttaaggcttcctaaaagtttgaggcaggaggagcaaaagagagtagtgaacacagggggtgacatggaactagatcatctgacttcttagcggtgacctgcaggccacctccatttggagagcaccattttgcaagtccagcctcgcctggcgggaagagctcatgctttctcctgggrctggcatttggcatcctgagcacctgctgaccggaacgagaaataatctggtgtctgacaccaaatgagctcttaatctttggcgccaacaagacagcatctaaggacaaccacggtgcccccattgtccgcttagggaatggacccctgttggggtgggaggtagactttttgttttcagaaccaacatgtctcaagcagctgtgcttaatatatgtttaatccccatccactccatggggcagcgttgtcatccgtttcacaggctgggcccctgagccgaggaggttgagcctcctg

SEQ ID NO: 353 - DNA, 601 bp, Human
cacacttcggtgaatccttcagtcattcagaatcagatgttgcatgtcacaggttgtgccttctcttgctgtcctctttcccagtgctcggtaaatcttgattaaaggaaggaaggaaggattgtttcagaagccttcaggggccctatcatgcagagaaggaaagtctaggctctctctgacacagcttgaagatgtctgagaggctcccatgtaccagggtagccttgcaagctgctgctcctacacatgcctcagccatcaggttattcactagttcccaaagtcaccctgtaacctrgtgggtttacatatgctgctcttggtgctggaatgccttggcccaccttcctcatccttccaaacctacttctagtgcccctcctgggaaggcccaccttctcatagcagggtgacaccgctggtgtgtctgcaggattccaaacctacctccagtgcccctcctgggaaggcccaccttctcatagcagggtgacaccgctggtgtgtctgcaggattccaaacctacctccagtgcccctcctgggaaggcccaccttctcatagcagggtgacaccgctggtgtgtctgcaggattc

SEQ ID NO: 354 - DNA, 601 bp, Human
cacacaagggttcctcacttctgacagcaacagcacactgaaggggttcccaagccaacttcagatttaccctttcaccataactcacagagctccctggaagcagttacacttatagttatgatttactgcagcaaaaagatacaggttaaaatcaaccaagatgcacacagggcagagtccaggagggaattgaatgcagagttcccaccagctctcccgtggaatcagatgtgttgtgttcccagcacccacgtgtggcagtgcacatggagtatcatcagccggaggtgcttccccragccttggtgtccagagtttttcccggggctctgacatgggcaggattggtccattgatcactcaggtactgcatggccagcccctgctccgtatcctgtcattagccaaggagcaaggccagccctctttttgggcaaggttaaattcttgccttccctcttgttgccgttgcttctgttcctggaggagctcctggcacagtgatggggtctcaggcctccaccttactgcacgatgaagagtttgaggagatcaagaaggagactggcttttcccacagtcaaatcacacgcctgta

SEQ ID NO: 355 - DNA, 601 bp, Human
tccccgagccttggtgtccagagtttttcccggggctctgacatgggcaggattggtccattgatcactcaggtactgcatggccagcccctgctccgtatcctgtcattagccaaggagcaaggccagccctctttttgggcaaggttaaattcttgccttccctcttgttgccgttgcttctgttcctggaggagctcctggcacagtgatggggtctcaggcctccaccttactgcacgatgaagagtttgaggagatcaagaaggagactggcttttcccacagtcaaatcacacgyctgtacagccggttcagcaacctggacaaaggagagaacaggacgatttccaggggattccagaacttgccatcaacccagtgggggactggatcatcaatgccttccttccagagggagaggaccaggtaaacttccgtggattcctgcaaactctggctcatttccaaaccattgaggataatgaaaagagcaaagttgtgaatggacctgaaccactcaacagccgaagcaacaaactgcagtttgcttttcgactatatgatttggataaagataacaagatctctcgtgatgagc

SEQ ID NO: 356 - DNA, 601 bp, Human
atgggcaggattggtccattgatcactcaggtactgcatggccagcccctgctccgtatcctgtcattagccaaggagcaaggccagccctctttttgggcaaggttaaattcttgccttccctcttgttgccgttgcttctgttcctggaggagctcctggcacagtgatggggtctcaggcctccaccttactgcacgatgaagagtttgaggagatcaagaaggagactggcttttcccacagtcaaatcacacgcctgtacagccggttcagcaacctggacaaaggagagaacagtacgatttccaggggattccagaacttgccatcaacccagtgggggactggatcatcaatgccttccttccagagggagaggaccaggtaaacttccgtggattcctgcaaactctggctcatttccaaaccattgaggataatgaaaagagcaaagttgtgaatggacctgaaccactcaacagccgaagcaacaaactgcagtttgcttttcgactatatgatttggataaagataacaagatctctcgtgatgagctgttaagggtgctgtgcatgatggtccaaataaatatctcag

SEQ ID NO: 357 - DNA, 601 bp, Human
agctgggcgtggtggctcacgcctgtaatcccagcactgtgggaggctgaggtgggcagatcacgaggtcaggagatcgagaccatcctggctaacacggtgaaaccccgtctttactaaaaatacaaaaaattagccgggcgtggtggcgggtgcctgtagtcccagctactcgggaggctgaggcaggagaatggcgtgaacctgggaggcagagcttgcagtgagccaagatcgtgccactacactccagcctgggcgacagagcgagactccatctcaaaaaaaaaaaaaaaaaaaaggccctctgggatgttgcctctccaggagctttttggtaaccaacacttctctcgggagtatgagatcatcctctgcactcttctctgtcatcaaagggctgctgggtggagatattcttgaaaggtggccttggtgagaggtgtggagtcaagtcttttaggttgcttgcccacgtcactctacctctggcctctgattctcaactttgtacctatggggcgtctcttgttagtgcagtgttgactattcaaaaagtagcaatatgcctgcagatttgcttagtcttgggacacggtta

SEQ ID NO: 358 - DNA, 601 bp, Human
agttcagtcacgagactgccgactgccagtacctcttctcttggtacacctcagccgtgtgtcctctggggtgagtatgacatccggaagcttagcacttgtaccccacatcttcccttaagaataagtgtatgtgtgttttttccccaatgttttcttgtgaaatattcagaacatgcaccaaaaaatagagaaaatgatagaagcggaccccacatagtcagtgccccgctccgttgcttgtcagcatcctgccactgatttttggtccatggctgcgtcacctcccaccacccccagyagcagtgccattgtttcctttgtgtgtaccatgccccgaatagggtccagtcagggcaccccagctctgtccctctaccctgttcccattgctgcctccctctccttagctcctgggaggcaagtactggtggtgcctcctctgtgtaatcctggaacatcttttgtgtcgtaatacaaatgattgtttggtaaagtttcactttgatttgagtgcagtatttttactttgatttgagtgcagtatttttacgtttgtttgaatgaatgaaaagcttactctccagattttgagaatcag

SEQ ID NO: 359 - DNA, 601 bp, Human
cttttgtgtcgtaatacaaatgattgtttggtaaagtttcactttgatttgagtgcagtatttttactttgatttgagtgcagtatttttacgtttgtttgaatgaatgaaaagcttactctccagattttgagaatcagcatgagaacagagggagcagtttctgctctgaaggaaggtggcacctccattggttgtcttgtgtcccacagccgttttatactttgccacgaataacatgttgtcagttgctttcctcttggatttattttcttcttatgttacccccacccatcattgkatttatatttatttttattttttatttttttgggatggactcttgctctgtcactcaggctggagtgcagtggtgcggtcttggctcgttgcaacctctgcctcctggttcagacgattctcctgcctcagcctcccaagtagctgggattgcaggcatgtgtcattatgccctgctaatttttgtatttttggtagagatggggtttcaccatgttgaccaggctggtcttgaactcctcacctcagataatctgcctgccttggcctcccaaagtgctggcattacaagcgtgagctg

SEQ ID NO: 360 - DNA, 601 bp, Human
aatgattgtttggtaaagtttcactttgatttgagtgcagtatttttactttgatttgagtgcagtatttttacgtttgtttgaatgaatgaaaagcttactctccagattttgagaatcagcatgagaacagagggagcagtttctgctctgaaggaaggtggcacctccattggttgtcttgtgtcccacagccgttttatactttgccacgaataacatgttgtcagttgctttcctcttggatttattttcttcttatgttacccccacccatcattgtatttatatttatttttaytttttatttttttgggatggactcttgctctgtcactcaggctggagtgcagtggtgcggtcttggctcgttgcaacctctgcctcctggttcagacgattctcctgcctcagcctcccaagtagctgggattgcaggcatgtgtcattatgccctgctaatttttgtatttttggtagagatggggtttcaccatgttgaccaggctggtcttgaactcctcacctcagataatctgcctgccttggcctcccaaagtgctggcattacaagcgtgagctgccatgcccggcctggccc

SEQ ID NO: 361 - DNA, 601 bp, Human
cttgtggtattttcagcttttgaatgtttatggtgttccggtgacgtcattacaaaatgaaaggattgaaactggaagttcttcctgaaagaagcaaaatgtgaatttttataaaagataaaacccagaagtgaactttccctgcattctctgtcatggagaggctacagctgccatgagatgaatcctgcctcctgacatggcagctggtcttctgtgtgggtttgagggaccaggccaggctaggatcccgtccatgttgaatgtttagagttcgacttctgtgagtaggaaaagcacygtttatagggctttggtgtttgactctaaaaccagagaggaagattctccaggaaacctcggtttcatgatgttcagaacatcaggattgggagctgtttaaatcccttaacacactgacaaggtaataaggactttaaaaaaaagaaacagaagttgaaaccaagagcaaaaactcagatggtggattttgagggatgcaggtaccacccgggggtgacgtggaatagtgcctgagatttttttttccccaaatgttatcagtgttgtacattgtagaatcatgtaaatatggccagac

SEQ ID NO: 362 - DNA, 601 bp, Human
cagatggaaggggcaggctatgtgcccagcacagttattgatgacaagacccacccacttatgaaataccaggagagcagatacaaagaaaagactgtaaaagctttaggggaggctaatttgttgtattagaaaataattcaagaaaggttaaaatactttaaatcctcactttatatcatcgataggttcttggaaactgcaactttatgtgaaatgatgtataatgaaaccagttttttttcctcagctttatgttatgttatgttatgttatgttatgttatgttatgttatgttagttttttgagacagagtctcgctctcgcccaggctggagtgcagtggcgcgatctcggctcactgcaagctctgcctcccaggttcacgccattctcctgcctcagcctcccaagtaactgggactacaggggcccgctaccatgcccggctaatttttttgtatttttagtagagacggggtttcaccgtgttagccaggttgatctcgatctcctgatcttgtgatccgcctgcctcagcctcccaaagtgctgggattacaggcgtgagccaccgtgcccggcctcatcaactttata

SEQ ID NO: 363 - DNA, 601 bp, Human
cgattgtggccctctacacccaaaatgcagaatggggcagaagaaggtctgggccgggaagggcatgtgatgtctgtctctgcgagccaccattgggcaggcttagtggcgacggactggtgtggtcctgttagtcatgtgaaaaagtccttgccctaatgttaagttgctctagagggccctctgctgttggattccaaagcccatcttctttccactcaatcacaacaaatacattagggtatatataacctgtcacggctactcatttgtcattcagaatgtgggagaaatgcagccrccaccagccccctggtggtgcagatgggggtggggctggcgggggtggggctcctgcccatgccctctctacactggagtaattattgtctcctttttttttatagggaaacagtgataagtaagctgaccacttgctgtaggagaagttccaacgtgtcctacaaatactcaaaggtaattttctgtggcgagtctcttgaaggcctgcctccccggccccctgtgctgcgctgtccatgtcgttctcatcaggggtgccaaggaaagcagtcacaggctgactggaatccagaaagga

SEQ ID NO: 364 - DNA, 601 bp, Human
actggagtaattattgtctcctttttttttatagggaaacagtgataagtaagctgaccacttgctgtaggagaagttccaacgtgtcctacaaatactcaaaggtaattttctgtggcgagtctcttgaaggcctgcctccccggccccctgtgctgcgctgtccatgtcgttctcatcaggggtgccaaggaaagcagtcacaggctgactggaatccagaaaggaaagcaacacccgttgcctcagccacttacgccagcacatttttttgttatttttttccctcaagtttctctcrtggttacaactgatttccttgaagtatttaataattaggttgtttccactgtttttggctgttctttaaaaaaaaaacaaaacacacacacacacagtagtgaagatagttgtgcatgtagcatttggatgatttctttcaggtaaatttgcagaaaagaggcattatctggatcaaaggacataatgtttgtggtctcgatgggtaatgatgaattgctctctaaaactaggcttttgactggagtccctcctttgacattcctcccctgccatgcagtgggcacctttcagtctatga

SEQ ID NO: 365 - DNA, 601 bp, Human
agtggtgaccctatggtagagtttggatctggggattgcagaatgtcactgggtgcgttgaagctgaaggcgtgcatttctctgagtaatgagaagcacccttgagtcaccaaggcactggcatatcaaaaagcggtgccgctgtccatatcttgacgattgtagacacagttgtagctgtagagagatgatgggattccgtcatcatcagagacctgccccatctgttgacccccaggctgtgactccaggcaccctgcagggcatcccaccactgctcagagcaattctagggcccattctggtttccagcctaagtgctgccccacccagagggtctttctggcccttgcttccgtgtgttctgtgtgtttttctacagcagagctttgggtggcttggttacaggatgggttgctacaggattcactgtgggatgagggagaggcagctggacatgatgtgaaccatgctctcgaagcctccggagatcaggtctgcgttgggagagacaggcacccctgccctggtagcaccgcacccctgcgaacgtcctagcaagcaggcaaagaaccagcccagggtcttgccactgggaagg

SEQ ID NO: 366 - DNA, 601 bp, Human
aagtgagttgtctaaaccagcggtgccaagaggagatttgggtcccagtgttcctgctgccgttggagaccttgtgtgggttcctgtggtctgcagcccgggcctggttctggtgactcctcacgtcgctcacgggccctcccttcagtgtggcagccttggagtgcttctgcccctcaggtctttgctgagagaaacgtgtgtttatttcagtgatgagaagacttggaacttgggtctgagtaatgcgaagctttcatattatgatgggatgatccaactgaactacagaggcggcacrccctataacaatgaaagacacacaccgagagctacgctcatcacctttctctgtgatcgagacgcgggagtgggcttccctgaatatcaggtaggaatgtttgttcctcatcgcgctccctgaggatactcatgcctgtggtgggcctttcatttaagcagagcttgtatcagtctgggtttccagccaaatcatcaccgtcattagatttgccagggtgcctgggcagtattagtattttaagctgtttatttagtgggttgtgcaccttaataacagcccacaagcctgtcagttttg

SEQ ID NO: 367 - DNA, 601 bp, Human
ggcggccttggttttaaacaacaggtggcgtgcggctgccccgggcatggcccctgctgtgtgtgctcctagcatcttggctgcttacctttgtcaccagcaagttccacttctcagtggcctgagcacagacggcacgcactttgcagacttgagtttttctgttaaaatttaaatttttttttaagtgagcctaatagtttcctgaactattatgttcagggaagttatgttgttgctgattctgatggggtgtgtgtgtgtgtgtgtgtgtgtgtgtgtgtgtgtgtgtgtgacagasacagagagaagtcgagtctaaagttctgtcaggcttagactatgcctgaatacttgaacgtttctagacagtgcccaatgtttaaagagaatacgaccaagcctaactaactgcgggttttcttcttttcagagatggggctggcaactccttcgacctctcgtccctgtcaaggtacagtgacaactgggaagccatcactgggacgggggacccggagcactacctcatcaatgtctgcaagtctctggccccgcaggctggcactggtgagagagggcctcctcgtggggtggtgtt

SEQ ID NO: 368 - DNA, 601 bp, Human
cctcttgcctggagcggcagggaagtttcctcttgggaagattgtgcagaggcttagtccagactcatgagctgctggggcctctgagcattctcctctgtgacctgagaggctcatggccgaggacaaaagggctgccccacatgtggggggcaaaggtgagagggtgtgtggggcccctgtgcccagggcccagaaggctgggagggaagggtgaaggggtgtgtggggttccccatgtccagagcccaggaggctgggagggaaggatgagggtggtgtgtgggggcctctgtgccccagacccaggaggctgggagggaaaggtgaagggtgtgtggaggccctgtgccccagacccaggaggctgggagggaagggtgggggtgtgtcgaggcccctgtgcccagggcccaggaggctgggagggaagggtgggggtgtgtcgaggcccctgtgcccagggcctgggaggctggactgcagcgtggcttatcagggtgcccagcaggaatcatggggtttacctgggaaggaaggtgctgctgaactcatcatgctaactctgcagtggacatgaagcgttttgagatgagcagag

SEQ ID NO: 369 - DNA, 601 bp, Human
gccatgtggcagcccaggtggggatggaggtttcttggtgagccacactcagtgccttgcccctgcggtgctcaggaagtttcatgagaggagccaactgctgtgacttgtgtctacggaccgtgagatgagggaaatgcatgaaaaattactaatttttggccaggcgcggtggctcacgcctgtaatcccagcactttgggaggctgaggcgggtggatcacgaggtcaggagattgagaccatcctggctagcatggtgaaaccccgtctctactaaaaatacaaaaaaaaaaaaaaattagctgggcgtggtggcgggcgcctgtagtcccagctactggggaggctgaggcaggaggatggtgtgtacccgggaggcggagcttgcagtgagccgagatcatgccacttcactccagcctgggtgacagagtgagactcggtctcaaaaaaaaaaaaaagaaaaattactaattttcataaatgtccagtatcgggggaaccagcccccgatttttcaacgtaggttcttttctatttccctaagtgttggccggtctgagaaataaggggaaagagtacaaaagagagaaatttt

SEQ ID NO: 370 - DNA, 601 bp, Human
caggcgcggtggctcacgcctgtaatcccagcactttgggaggctgaggcgggtggatcacgaggtcaggagattgagaccatcctggctagcatggtgaaaccccgtctctactaaaaatacaaaaaaaaaaaaaaattagctgggcgtggtggcgggcgcctgtagtcccagctactggggaggctgaggcaggaggatggtgtgtacccgggaggcggagcttgcagtgagccgagatcatgccacttcactccagcctgggtgacagagtgagactcggtctcaaaaaaaaaaaaaagaaaaattactaattttcataaatgtccagtatcgggggaaccagcccccgatttttcaacgtaggttcttttctatttccctaagtgttggccggtctgagaaataaggggaaagagtacaaaagagagaaattttaaagctggtgtccgggggagacattacatgttggcaggttctgtgatgcccccgagccgcaaaaccagcaagtttttattagcaattttcaaaggggagggagtgtacgaatagggtgtgggtcatggagatcacatgcttcaaggatgacaagaggtcacaa

SEQ ID NO: 371 - DNA, 601 bp, Human
cttgggcccggcgcgcagacccgcggagtttcccgtgccgacgccccggggccacttccagtgcggagtagcggaggcgtgggggcctcgaggggctggcgcggcccagcggtcgggccagggtcgtgccgccggcgggtcgggccgggcaatgcctcgcgggcgcaatgaatccgcggcaggtaagccgggccggccttggaccttcgccgccgtctgggttcgtttacaacctcacaggctttgtgttgcagtgcgtagcgtgtgcgtcttgtgagtgttagagtgtgtgtgtgtgtggcgtcttgccaagcagcattgctggtttaggaatttgtgcgtcttgtgagtgtgtgtgtgtgggtgtgtgtcgtcttgccaagcagcattgctggtttaggaatttgtgcgtcttgtgagagtgtgtgtgtgtgtgtgtgcgtgtgtgtgtagtcttgccaagcagcattgctggtttaggaatttgtgaatttgtatcctgctcattaattctgcagaatggagcagtgcgtgaagagggcttgggggaaaatgcgcccccgtctgagtaggaaggcctgagcccatgtcaaggcagaca

SEQ ID NO: 372 - DNA, 601 bp, Human
acctcctgaaggccttctgggagttaaaaatggcacttaagctgtaggagaaagcttgttaaccactttatagctaaaaactgggaaaacacaaatggccttcagcaggttaacagataaactgaaatacatccacataatgggatactgcttagtagtgaagaggaaatactgttacaagtaacaacacgggtgactcgcaagtgcgttatgctaagcacgagaagccagactcaaaaggctgcatactgtatgagtccatttatatgacattctggaaaaaaaaaaccacagttatagsgatggaaagtggatccgtgggtgccagggactgggtatcgtggaagaaattgattgttgagtggcatgaaaaagctttttagggaaatagaaatgttctatatcttgattgtggtggcgattgtcgaaattcatagatttatacacttaaaaggataaattttactgtatctaaattatatacctcaattttgttaagatatatatatatatttttttttttaagcactcctttgaaaggattaaggacgcctaacttgaaggaaaagcatttctgcacaggtgtcagtgtattgcactg

SEQ ID NO: 373 - DNA, 601 bp, Human
tgctaagcacgagaagccagactcaaaaggctgcatactgtatgagtccatttatatgacattctggaaaaaaaaaaccacagttatagggatggaaagtggatccgtgggtgccagggactgggtatcgtggaagaaattgattgttgagtggcatgaaaaagctttttagggaaatagaaatgttctatatcttgattgtggtggcgattgtcgaaattcatagatttatacacttaaaaggataaattttactgtatctaaattatatacctcaattttgttaagatatatatatatwtttttttttttaagcactcctttgaaaggattaaggacgcctaacttgaaggaaaagcatttctgcacaggtgtcagtgtattgcactgtggaacctgtgtggtaaaggcaaagggggtagtgcttatctcttgatcctaaatatgtgagaccagattaaagtgaaatctgggaggcaatgaatgttaaatgagttgttatgtaatttgcatagaggtgatgctgagagatttagaaaggatcactgtgggttgcttgctcactttcttgctctcctattccgtagctttccaaatggct

SEQ ID NO: 374 - DNA, 601 bp, Human
gctaagcacgagaagccagactcaaaaggctgcatactgtatgagtccatttatatgacattctggaaaaaaaaaaccacagttatagggatggaaagtggatccgtgggtgccagggactgggtatcgtggaagaaattgattgttgagtggcatgaaaaagctttttagggaaatagaaatgttctatatcttgattgtggtggcgattgtcgaaattcatagatttatacacttaaaaggataaattttactgtatctaaattatatacctcaattttgttaagatatatatatataattttttttttaagcactcctttgaaaggattaaggacgcctaacttgaaggaaaagcatttctgcacaggtgtcagtgtattgcactgtggaacctgtgtggtaaaggcaaagggggtagtgcttatctcttgatcctaaatatgtgagaccagattaaagtgaaatctgggaggcaatgaatgttaaatgagttgttatgtaatttgcatagaggtgatgctgagagatttagaaaggatcactgtgggttgcttgctcactttcttgctctcctattccgtagctttccaaatggctg

SEQ ID NO: 375 - DNA, 601 bp, Human
ttgcatagtggcgtcttgttcatgcagtcattaattcaacaaatgtttgttgagaatcagctttgtgccaagtgctagagaggttgagatgattgaagcatagtccttgacccccaagagctcaccatggaatcaactgaagcccctcatcagtactgtgttgggaatattgagagtggagagttgagtataacttataggacacctaatgttaattacctttcagacactgcaatgtgtgtgtgccataaaaaaaaaaaaaaatccagtagctctgatacgagggaaagtaaatggttttaacaggtgctgagtaggagaagctcaaggagaggaaaccccaagggctgaagaaggtgggagtcaggagtctcctgaagcaagtggcatttaaggagctctataaggaaagggtcagagttgtgataggtggctgtggagggagatgtgccacctggattggcatgtagagggatagaaagattataggcctttgcaatggcccagtaagaggtaatgaggggctggaactggaagaaaacacatttaagacacagtacagaggtggcagacaaggtgggacttggcaactacctgatga

SEQ ID NO: 376 - DNA, 601 bp, Human
gtcaggagtctcctgaagcaagtggcatttaaggagctctataaggaaagggtcagagttgtgataggtggctgtggagggagatgtgccacctggattggcatgtagagggatagaaagattataggcctttgcaatggcccagtaagaggtaatgaggggctggaactggaagaaaacacatttaagacacagtacagaggtggcagacaaggtgggacttggcaactacctgatgagatccaggagatgaggccaggaggcgggcagcaaagatgacgcaggtttctagccttaatargctaggaggagagtgatgccattagcaataagaactacaggagaaggagctgagtttgagggaactattaatttggttcagaatatgtgctgtttgagttatggcaggatatttaagtggacagactgtcgacatagttggaaattcagatcttaagctcccacacaaggtagtggctggacatagtagatttgagtgctcttgcttcagagggctagtttaggttggggcagtgattaaagcaacctaggaaataaattataaaggaagaagaggtccttaaaaccttggagactgatt

SEQ ID NO: 377 - DNA, 601 bp, Human
tcagagggctagtttaggttggggcagtgattaaagcaacctaggaaataaattataaaggaagaagaggtccttaaaaccttggagactgattatataaagggtggatccgttaatacagtagctattaaaaaattataaggggtgggaaaaagggacaaagaagaaaaaagaggtgaaagacctttgctgtgtcaccaaaccctgggaggagaattttttaaaagaagagtactcaatccacagtgaactacggcatgtttgttaaacacaattgaccaccacacagcgaagacccaamtgaggttcaagagaaggaatttttatggaccctgttagcacaagtcaaggtccttctccagtaccactgggaagctttggagaagaaaagggggacagtgggccttgggtggagaagggaactgaccatgagatccaggtggggtgaggaggtgtgtgaagtcagagtggggaagaatcagggtggcttactggcagcttcaccggggtcatgcgaggagcaggttccaccagagtaaggagtgaagttgtagaaacacagggaagtcaccatcagaaaagagcaggagtcaagaaacta

SEQ ID NO: 378 - DNA, 601 bp, Human
ggtttgggcaaaagtctctggcatcccttctgagcctgggtaccacactgaagagtgaggacagtgtgccatttttatcaggaaaccctccagctccctgaagaccaaattctgatcctcctgggatggcagtgaagagccacagagatgactctgaggtcccgtggccttttcccacctggagattgttttcgttactgcgctgttacagccttggaggactggggttcagtttcatccaatcacatttcttcttttgtcatagtcatctaaacgatagatcttagagacaggtgggcarggggtgcactggtgagcctgacttaaggagaggtcatctcgtcccttccctagtcccatctcccttggttattgttatttcatgtgattgttctggttatttcaggttattctgtttttgttttcaaaacaataacatatatttgttgttctgattttaaaggggtaattgttttggtaactagaaaattaccttctcaactcccttaaattctgtcaaagggaaaagtaagttaggttgctggagaggctatgctgaggcctcagaacctctgtactcctggaagttctgcgtgctttg

SEQ ID NO: 379 - DNA, 601 bp, Human
ggtgggcaaggggtgcactggtgagcctgacttaaggagaggtcatctcgtcccttccctagtcccatctcccttggttattgttatttcatgtgattgttctggttatttcaggttattctgtttttgttttcaaaacaataacatatatttgttgttctgattttaaaggggtaattgttttggtaactagaaaattaccttctcaactcccttaaattctgtcaaagggaaaagtaagttaggttgctggagaggctatgctgaggcctcagaacctctgtactcctggaagttctgygtgctttgcctcctgctcccctctctgtgttcctgttggcaggcccctaggcaggatttaggaggtaggcaagtcaccctagccaagtcataagcccatggctcaattgccttctcagcccttcaagggctgttccacaggcagcaaagggaggggcctccacaggttcaccactgcagccctaattcattttctttttccactgtcttattctgcaggggtattccctcagcggatactacacccatccatttcaaggctatgagcacagacagctcagataccagcagcctgggccag

SEQ ID NO: 380 - DNA, 601 bp, Human
catctgccttggaagatcctcttgagtttttagacatggccgagatcaaggagaaaatctgcgactatctcttcaatgtgtctgactcctctgccctgaatttggctaaaaatattggccttaccaaggcccgagatataaatgctgtgctaattgacatggaaaggcagggggatgtctatagacaagggacaacccctcccatatggcatttgacagacaagaagcgagagaggatgcaaatcaagagaaatacgaacagtgttcctgaaaccgctccagctgcaatccctgagaccaraagaaacgcagagttcctcacctgtaatatacccacatcaaatgcctcaaataacatggtaaccacagaaaaagtggagaatgggcaggaacctgtcataaagttagaaaacaggcaagaggccagaccagaaccagcaagactgaaaccacctgttcattacaatggcccctcaaaagcagggtatgttgactttgaaaatggccagtgggccacagatgacatcccagatgacttgaatagtatccgcgcagcaccaggtgagtttcgagccatcatggagatgccctccttctacag

SEQ ID NO: 381 - DNA, 601 bp, Human
cgcgcagcaccaggtgagtttcgagccatcatggagatgccctccttctacagtcatggcttgccacggtgttcaccctacaagaaactgacagagtgccagctgaagaaccccatcagcgggctgttagaatatgcccagttcgctagtcaaacctgtgagttcaacatgatagagcagagtggaccaccccatgaacctcggtaagagaccacccaggaactgtacctagggttggggtcaggtgcttttgctcctgacgcagtcttggctgatttgtgagcagtgctgtttggtggcrcctatcttttcctccttcccttctgccttttagctaaattccccttgattggccctttctccagatattgagcagggaatatagaccttggaccagccagaatcttggctgaacaagggggaggttgactctgttggctgtaatgaagcttctttagaaatgattggttttggccgtacgcggtggctcatgcctgtaatcccagcactttttgaggccgaggcaggcatatcacgaggtcaggagtttgagaccagcctggccaacatggtgaaaccctgtctctactaaaaatacaaa

SEQ ID NO: 382 - DNA, 601 bp, Human
tccttcccttctgccttttagctaaattccccttgattggccctttctccagatattgagcagggaatatagaccttggaccagccagaatcttggctgaacaagggggaggttgactctgttggctgtaatgaagcttctttagaaatgattggttttggccgtacgcggtggctcatgcctgtaatcccagcactttttgaggccgaggcaggcatatcacgaggtcaggagtttgagaccagcctggccaacatggtgaaaccctgtctctactaaaaatacaaaaattagctgggcrtggtggcgtgcacctgtagtcccagctactcaggaagctgagacaggagaatcacttgaacccaggaggcagaggttgcagtgaactgagattgcgccactgcactccagcctgggccacagagcaagactccatctcaaaaaaaaaaaagaaagaaatgattggtcttgggggccggggcggtggcttacgactgtaatcccagcactttgggaggccaaggcaggcagatcatgaggtgaggaattcgagaccagcctggccaacatggtgaaaccccatctctactaaaaatacaaa

SEQ ID NO: 383 - DNA, 601 bp, Human
ctgaggcaggagaatcacttgaacccaggaggtggaggttgtagtgagccgagattggcgccactgcactccagcctgggcgacagagtgagactccatcttggaaaaagaaagaaaaaagaaaaacatgattgatctccatgcatcaatatcatgcctgcctcctaaggcagaggtaatgaagacttaattcccttctgtaggccttcccctcctccctaagccgttttctgagagaggtgcaggagcaggtgggttggggcaggctgcatacacagtgggggtgggttgtgctgctaarcagcagcaggtccacaatcccccctctgcatagctcctggggggaaaggatggaggagcgtgtgcacggctgcctgcctgttgaaggtggtggttctaattttataaacctcctctgcacagatgggtaggctagcacttgctgccactcctgagctgtgaagtcagcgattacctcactcagatagctggtcaggccctgcactgtaggtcctaataggccagtggacagattgaggaaaacaggagcttctgaagggcataacagagagcaaaaccactgaagctgagtggctgcagc

SEQ ID NO: 384 - DNA, 601 bp, Human
tttctgagagaggtgcaggagcaggtgggttggggcaggctgcatacacagtgggggtgggttgtgctgctaagcagcagcaggtccacaatcccccctctgcatagctcctggggggaaaggatggaggagcgtgtgcacggctgcctgcctgttgaaggtggtggttctaattttataaacctcctctgcacagatgggtaggctagcacttgctgccactcctgagctgtgaagtcagcgattacctcactcagatagctggtcaggccctgcactgtaggtcctaataggccagtgracagattgaggaaaacaggagcttctgaagggcataacagagagcaaaaccactgaagctgagtggctgcagctgcagccagggaaagagccagtaggatgggggagaattccactgacctttatgtttacctagcctggtttctaggggtgtagattcctggctagggcccttattccttgtcttgactgtcttcatgacaccaatttggcatttcaggagagcggttaagaaaaggagttgtgtctgtccaaaagctggcaaggccagagctggattgtttggggtagagactggatg

SEQ ID NO: 385 - DNA, 601 bp, Human
caggtagattacctgaggtcaggagttcaagaccagccggaccatatgaggaaaccctgtctctactaaaaatacaaaaattagctgggcgtggcagcgggtgcctgtaatcccagctactcgggaggctgagacaggagaattgattgaagctgggaggcggaggttgcagtgagctgagatcgcaccactgcactccagcctgagcaacagagcaagactccatcttgaaaaaaatcattcaagctgattgaaaaagtagtcatttcaatgaaaagtctcatttccgtctcagacttcyagtttccctccctagacccatatattactatagccctgcattagcaactgggatgcggtctgagaagcatggttttgttgttgtgagaacatcagtgtgtatttacataaacctagatggcatgggctcctacacacgtacaggctgtatggtatggccggttgctcctaggctacaaacctgtacagcatgtaactgtagtgaatactgtgggcagctgcaacacactggtaagtattggtgtctatctaaacagcaaaaagatacagtaaaaagacagcataaaggattaaaaaaata

SEQ ID NO: 386 - DNA, 601 bp, Human
gcagtgagctgagatcgcaccactgcactccagcctgagcaacagagcaagactccatcttgaaaaaaatcattcaagctgattgaaaaagtagtcatttcaatgaaaagtctcatttccgtctcagacttccagtttccctccctagacccatatattactatagccctgcattagcaactgggatgcggtctgagaagcatggttttgttgttgtgagaacatcagtgtgtatttacataaacctagatggcatgggctcctacacacgtacaggctgtatggtatggccggttgctcytaggctacaaacctgtacagcatgtaactgtagtgaatactgtgggcagctgcaacacactggtaagtattggtgtctatctaaacagcaaaaagatacagtaaaaagacagcataaaggattaaaaaaatactacacctgtatagggcgcctgccatgaatggagcttgcaggactagaagttgctgtgggtgagtcagccagtgagtggagaatgaatatgagggcctaggacatgactgtacactaatgtaggctttgtaaacactgttcacttaggctaactacatttatttaaaa

SEQ ID NO: 387 - DNA, 601 bp, Human
agcataaaggattaaaaaaatactacacctgtatagggcgcctgccatgaatggagcttgcaggactagaagttgctgtgggtgagtcagccagtgagtggagaatgaatatgagggcctaggacatgactgtacactaatgtaggctttgtaaacactgttcacttaggctaactacatttatttaaaatatttttctttaataaattaaccttagcttactgtaacttttttactttatttttactttattttttactttattaacttttttattttttgttccttttgtaataatacktagcttaaaacacaaacatgttgtactgctatccaaaaatatttcctttgtttatatccttaattctatagtcttttttctgtttgtaaatttttttatttttttaactttttaaacttttttgttgaaagctaagatgaaaatacattagctgttagcctaggcctacacagggtcaggatcctcagtatcactgtcttccacctccacgtcttgtcccactgtaaggtgttcaggggcaataacatgcatgggggccgtcatctcctatggtaacagtgctttctggaatacctgcct

SEQ ID NO: 388 - DNA, 601 bp, Human
taaatttttttatttttttaactttttaaacttttttgttgaaagctaagatgaaaatacattagctgttagcctaggcctacacagggtcaggatcctcagtatcactgtcttccacctccacgtcttgtcccactgtaaggtgttcaggggcaataacatgcatgggggccgtcatctcctatggtaacagtgctttctggaatacctgcctgaggctttttttagttacttatttttctagaagtagaaggagtatacgctgaaataatgataaaaatatagtaaacacataaggagygtgtagcctagatccctcgcattcacagttcacagtcgagttcacactcctacaagaatctcatgctgctgctgatcccacaggaggcggagctcggaccagaatgctttcttgctcgccactcacctcttcctgtgtgcccaggttcctaacaggttacagagccctgcacttggtgataagaatttttcagctccatcataatcttacggggcccctgtcatatgtgtgatttatcattgaacaaaacactgttatgcagtacatgactataccagtttcttgagtccttctagaaat

SEQ ID NO: 389 - DNA, 601 bp, Human
tttatttttttaactttttaaacttttttgttgaaagctaagatgaaaatacattagctgttagcctaggcctacacagggtcaggatcctcagtatcactgtcttccacctccacgtcttgtcccactgtaaggtgttcaggggcaataacatgcatgggggccgtcatctcctatggtaacagtgctttctggaatacctgcctgaggctttttttagttacttatttttctagaagtagaaggagtatacgctgaaataatgataaaaatatagtaaacacataaggagtgtgtagcytagatccctcgcattcacagttcacagtcgagttcacactcctacaagaatctcatgctgctgctgatcccacaggaggcggagctcggaccagaatgctttcttgctcgccactcacctcttcctgtgtgcccaggttcctaacaggttacagagccctgcacttggtgataagaatttttcagctccatcataatcttacggggcccctgtcatatgtgtgatttatcattgaacaaaacactgttatgcagtacatgactataccagtttcttgagtccttctagaaattgctgtgc

SEQ ID NO: 390 - DNA, 601 bp, Human
tgagtgtgtagcagacatatagccatagcagtattgaaatgtgccattggaggtgaatgcagagtgctgtggggacacagaggacactgctgccactgtctgccagggagctgaggaaggttgcatagagaggggaaatgctaattgagtaactacgtttattaactatctcgtacaataatatactttagttgcttcttaatgtgaattatgctgggtctttttttcctttctgtctactgtggctggtgacgttaactaattttatgacttcttttctgttttttttttttttttttttggagatggagtctcactctgtcacccagggtggagtgcagtggcgcagtctcagctcactgcaacctccgcctcctgggttcaaacaattctcttgcctcagctcctcgagtagctgggattacaggcatctgccaccacatctgactatttttgtatttttagtagagacagagtttcaccatgttggccaggctggtcttcaactcctgacctcagatgatccacccgcctcagcctcccaaagtgctgggattacaggcatgaaccaccgcgacagccatgacttttaatatctaaa

SEQ ID NO: 391 - DNA, 601 bp, Human
gtattgaaatgtgccattggaggtgaatgcagagtgctgtggggacacagaggacactgctgccactgtctgccagggagctgaggaaggttgcatagagaggggaaatgctaattgagtaactacgtttattaactatctcgtacaataatatactttagttgcttcttaatgtgaattatgctgggtctttttttcctttctgtctactgtggctggtgacgttaactaattttatgacttcttttctgttttttttttttttttttttggagatggagtctcactctgtcacccaggstggagtgcagtggcgcagtctcagctcactgcaacctccgcctcctgggttcaaacaattctcttgcctcagctcctcgagtagctgggattacaggcatctgccaccacatctgactatttttgtatttttagtagagacagagtttcaccatgttggccaggctggtcttcaactcctgacctcagatgatccacccgcctcagcctcccaaagtgctgggattacaggcatgaaccaccgcgacagccatgacttttaatatctaaatgctggagaccactcagagctcccgattcc

SEQ ID NO: 392 - DNA, 601 bp, Human
ccacctccagcgtcagcactctaatccaagccactgtctcatctagactgtcacaatagcctcctaactgatctttctactttatttactcaacacttatttatggagtatcttctattttttttagaacaggaaccaaacattaaccaatagtcacctaaagaaatgtaagatctcatatttgataagtattccaaagggctggagttgcagcgagaatcaattatagcacagtttgacttaggaaggagagggggaagggcttccccaagaagtactgcctgagctgagactttaaggwtgatgaagagagaaagactgagggttctaggcgaaggacactgttaaatcctgtggtgggagaagcgcagagctggcaaagaggctgagaggaggcacttatggcaatagccccatttggctagtggctaccatattggatagcacagctctaaaggattctagttgcataattaacaaactttatcatatatgtaaatatatcagtataaaactttgcacgtaagagttcatattcttttcaaacacatggggcagtcatgaaattctcctggatccctgaggtaaagatactacacaa

SEQ ID NO: 393 - DNA, 601 bp, Human
taaggatgatgaagagagaaagactgagggttctaggcgaaggacactgttaaatcctgtggtgggagaagcgcagagctggcaaagaggctgagaggaggcacttatggcaatagccccatttggctagtggctaccatattggatagcacagctctaaaggattctagttgcataattaacaaactttatcatatatgtaaatatatcagtataaaactttgcacgtaagagttcatattcttttcaaacacatggggcagtcatgaaattctcctggatccctgaggtaaagatactrcacaatctgtccctcctgaccgccttcaccatcttcttttcatgccactgtccctctcattctgaacttaagcccactggcctgcacgggcctgccagcatggacaaagaaaagagtgaaggcatttagttgcttcggatcatcaaggaacagtgagaaactccatgtggttgaacataaacgttgattccttttactgcctgagctgctaagtcttgaaactgaagcctctgttatatgcagttagagtatccaaagctgggttctcagccagtggattaggatctggttgaaagctag

SEQ ID NO: 394 - DNA, 601 bp, Human
ctggatccctgaggtaaagatactacacaatctgtccctcctgaccgccttcaccatcttcttttcatgccactgtccctctcattctgaacttaagcccactggcctgcacgggcctgccagcatggacaaagaaaagagtgaaggcatttagttgcttcggatcatcaaggaacagtgagaaactccatgtggttgaacataaacgttgattccttttactgcctgagctgctaagtcttgaaactgaagcctctgttatatgcagttagagtatccaaagctgggttctcagccagtrgattaggatctggttgaaagctaggattcttgatgccttgtctggtacatttccaagctgttttgctccaccatgctcttccctctgtgtttggaaattaccagccggagcggtagaagccacctccctgctccacttgggcactttattgtcagcgcagctcatgcgcccaagatccattccttaccccagagttagcttaagcctgccaggagtcaaaaaaacaactcccagcaaaacctgggtccctggcctaaggccgaccttgacctaatgacctctccaggtcaagtccccttg

SEQ ID NO: 395 - DNA, 601 bp, Human
gccggagcggtagaagccacctccctgctccacttgggcactttattgtcagcgcagctcatgcgcccaagatccattccttaccccagagttagcttaagcctgccaggagtcaaaaaaacaactcccagcaaaacctgggtccctggcctaaggccgaccttgacctaatgacctctccaggtcaagtccccttgagctaataggaagtaaatgagggaatggagttgggcgctttaaaaatcagacagtgtatgaagtaacagtgacttgtggggagaaaggtagtcccttctgattctgcttaagaagagagtccaagttggtgctagcatttcgttaagccttcctcatacttcataatcttcctttatagtaaggacaggctcagagcctttgcaggtaacagtatctagtcagaattttataacatgattttatcatattctgttttacagccaccttcaatatgtggcaagtgatactggttttccatttacagtagtgaaacaaagtttcctatttcagtgtgtttacatttttatctcttttttcatacctagtattacggatatttacatttttagagtctgtttgttta

SEQ ID NO: 396 - DNA, 601 bp, Human
agccaccttcaatatgtggcaagtgatactggttttccatttacagtagtgaaacaaagtttcctatttcagtgtgtttacatttttatctcttttttcatacctagtattacggatatttacatttttagagtctgtttgtttattttagagatggggatcttgctgtctcgcgcaggctggagtgcagtgatatggtcatagctcactgcagccttgacctccagggctcaagtgatcctctcaccccagcctcccaagtagctgagactataggcacagaccaccgtgcccagctaawttttttttttttttttaagagacaggggtctcgctatgttgcctgggggattactatgttgcccaggctggtcttgaactcctggcctcaagtgatctcccaccttagctcctcaagttgctgggattacaggtgtgagccacaatggctggctctaagaagtcaatttagagaaaaatattaattaatagtccaagtaatacctggatgtggcacaaatcatgtggtgattcatgaatgaccaaaatctaggaaatgctgccttagaaacagcttctgtttgacgggtccatatgtttg

SEQ ID NO: 397 - DNA, 601 bp, Human
aggctctgagacatgccgcctcccatggcgcctgaaagcgggtgcctctcatcctcccctggagtccatgcatgtaagtccaaggcagggagaagagacttcattttagctacagtcaattcagagtgaggaatgagttcttagttcctagaggagagaatatgggagtctaggatctgagaaactgaggctgtttctgccttgaagctttcagaacaaatagccttcatcctgttttccatcggtttccttccattattctatttctgttttaaacaccttcctagggaatcgctgtgtraaaggagattctctcagcctaaaaggagaaactgtcaatgactgccatgcagaaataatctcccggagaggcttcatcaggtgagcgaggtcagagctgtggcccggctgcccggctgtggagagctccagttccctgccccacatggctctgacacggcctctgaatccccctcagacagacgggtcatgatgtggcagtggcagcctttgcttttcacccgtccatttgaacctgtctgatggaatccatcccctctgtgacctgagctgcctcccactgctcggcctgtttttaaat

SEQ ID NO: 398 - DNA, 601 bp, Human
ccacaggtgagttttaacagccacccctgtttttcagcactgctccgtgtggagatggcgccctctttgacaagtcctgcagcgaccgtgctatggaaagcacagaatcccgccactaccctgtcttcgagaatcccaaacaaggaaagctccgcaccaaggtggagaacggtgagtgatacatgcccccgcctcctttcctcaaaaggctctgcaaggtccagggaccccaagtctctacaaggctgctaggattttaccattagtcactgggcacagaggtgctgtttacaggaaaggraagacctgggtcagggagctgtgtggtaagatcagggttctattttgaatgtgttagtttgggagatctgggagatccccaagtcaaataggaggtgggggttcccatgtggagctcagaggagggagcttggctggaaatagaaatatgggagtcatccccctatagggtcttcatggccatgagaatgcataggattacctcaagaaagcggggaggaaatgaagagtgcggcacaaccaagccctgaggagttgacagatgaggatgccaaatgctggggtcccctcctgtctagct

SEQ ID NO: 399 - DNA, 601 bp, Human
gttagtatgtctagagggtgctcagtcttagccaaacagaaccctaaatacaggggaaagatcatgaccccacacttcctctctcctatgagtcttgagtccctgcttcagaatcttattcctgaaaggtttccatctttctcccgttgcttctgggattcctaggttggcagagtcagcatatatgattccaaaaggcaatccgggaagactaaggagacaagcgtcaactggtgtctggctgatggctatgacctggagatcctggacggtaccagaggcactgtggatgggtaaggaracaggagagcgcagtgaggaccaagcctctgccctgacttgcaagggtgcatcatacctctgcagtctcagggcttgagagccgcctcccctcccacggtgtctccactgtgagctccttatcttacaggtcccaggtgaataatgagtgcttttgtttctctaggccacggaatgaattgtcccgggtctccaaaaagaacatttttcttctatttaagaagctctgctccttccgttaccgcagggatctactgagactctcctatggtgaggccaagaaagctgcccgtgactacga

SEQ ID NO: 400 - DNA, 601 bp, Human
gtcatgactccaagagcagagcagggaagagcccaagcatagacttggtgccgtggtgaaggctgcagtccagttttgtgatgctgcttttacgtgtccctcgataacagtcagctagacacactcaggaggactactgaggctctgcgaccttcaggagctgagcctgcctctctcctttagatgacagaccttcatctgggaacgtgctgagccagcaccctcagatgatttccctccaaactgctgactaggtcatcctctgtctggtagagacattcacatctttgcttttattctrtgctctctgtacttttgaccaaaaattgaccaaagtaagaaaatgcaagttctaaaaatagactaaggatgcctttgcagaacaccaaagcatcccaaggaactggtagggaagtggcgcctgtctcctggagtggaagaggcctgctccctggctctgggtctgctgggggcacagtaaatcagtcttggcacccacatccagggcagagaggtctgtggttctcagcatcagaaggcagcgcagcccctctcctcttcaggctacagggttgtcacctgctgagtcctcaggttgttt

SEQ ID NO: 401 - DNA, 601 bp, Human
caagttagcctatgaatattttgtttgacctaaatagtatttcttagaaattgagttggaatacctttagacagagattgtgtctggcttgtcttagtcctcaccattccttattccctcacacttggcccacttcacatacttatgtcgcctgactggctgttgtaggtatttgagtttttcaactctatggagtgtctatcatgcaccaacaaactgtgggtgctcattcaatgatagttttccctttatgcgcatctcttaatgtagcctgccctaatacgccataggcttctgcttyccagccactgccactgaccttgagtctgtcctcttaggtctgtggtggcctctagggaggggacagaagatagtgccttgcacgggattgaggaactgaagaaggtctgtgcttttcactgacattgaccagagacctctatctgttccttctcatggggacataaaagccccagcattcagccaaagcctatttcctccctcccctgttcctggccctgatatcctcacacagtagatttgtgccctggaatcctcccagttacactaccttgtccatcctcctctcctaggtggctgc

SEQ ID NO: 402 - DNA, 601 bp, Human
gttcaagaccagcttggctaacatggtgaaaccacgtctctaccaaaaatacaaaaattagccgggcgtggtggcaggtgcctgtaatcccagctacttgggaggctgaggcaggagaatcgcttgaatttgggaggtagaggttgcagtgatccaagatcgtgccactgcactccagcctgggtggcagagtgagactccatctcaaaaaaaaaaaaaaaaaaaaaagcactttgggaggccgaggtgggcgaatcacgaggtcaggagatcgagaccatcctggctaacacggtgaaaycccatctctactaaagatacaaaaaattagccgggcatggtggcgggcgcctgtagtcccagctatttgggaggctgaggcaggagaatggcgtgaacccaggaggcagagcttgcagtgagccgagatcctgccactgcactccagcctgggtgacagggtgacagagcaagactccatctcaaaaaaaaaaaaaaaagaaaaaaaaagaaaacaaagaaaagaaaagcactctgaaaaacccttgacccagctgacaagagacccaatcactctgacttcctctccagaaagtcctga

SEQ ID NO: 403 - DNA, 601 bp, Human
ccatctcaaaaaaaaaaaaaaaaaaaaaagcactttgggaggccgaggtgggcgaatcacgaggtcaggagatcgagaccatcctggctaacacggtgaaaccccatctctactaaagatacaaaaaattagccgggcatggtggcgggcgcctgtagtcccagctatttgggaggctgaggcaggagaatggcgtgaacccaggaggcagagcttgcagtgagccgagatcctgccactgcactccagcctgggtgacagggtgacagagcaagactccatctcaaaaaaaaaaaaaaargaaaaaaaaagaaaacaaagaaaagaaaagcactctgaaaaacccttgacccagctgacaagagacccaatcactctgacttcctctccagaaagtcctgagtatacctaggagtgatcagaggaggcccttcccctctttctaatcttcctctcggtcaagcccaccccagcacccttcctcacaagcacactgggggccactggtactatcacatgcatgcccgggggttactaacaagtggtctacggggtcttcatcctctcccaattcctcttgggtgtcttcacctcttcagcc

SEQ ID NO: 404 - DNA, 601 bp, Human
ggatggtgagagggaagatgggagtggtgaggggtggggagggggaaatagaatggttcagaggagctgttgtttttctgggtcttagggtacctgctcagagggagggacggggtgaatatcctgactggaccccagccaggggagcaggaggaacagctgcacagccagcctttcgactctgatgccctccccttctcctagacaacctcacggaggtgcagactatagtggagcaggtgaaagagaagaccaaccacatccaggccctggcacacagcaccgtgggtcagaccttgcyggtgagagtccagccgtgacaaagggacccaggtggcagttgcagccaggccttcctggagatgcctctcctgctcctctttctctctctccagatccctctgaagaagctctttccctccatcatcagcatcacatggccactgcttttctttgaatatgaagggaacttcatccaggtatggggaatgagaaggtcctatctgcagtaaggggctcagagggtgagggattccaagaatcaaaaaacccaaggctgtagggcagaaagtttggagacctctctgaccctcacaaagcc

SEQ ID NO: 405 - DNA, 601 bp, Human
aagaaggtgggggtcagaatgcattatagcaaaaagaaggcctcatggaaggggtggtattttgagctaggcctggtggttatggcttggataggtggacagaagagcattcctgttaggtcattcaccaagtcccagaagggggactgggcatgatatgtgagggacacaggtctaaccagagtggcaagtcactttagagcgcagtgagggattgtgaagaagtaggaaggggagggatgtgggaggttaaagccaggcaggaatttggactttgccaaatgcagctagacctgcgctrtccaaaacattggccaccagccacatgtggctattgagcacttgaaatgtggctaatgtgactgaggaactgaatttttaattttatgtaaaaaccaaagctgtatactttttaaattaaatgtaactttaatattttggtaggactacatttctctttttagcattgcaaatctagcacccaaattgaggtgggctggctgggcatggtggctcacgcctgtaatcccagcattctgggaggccgaagcaggcagatcacttgaggtcaggagttcgagaccagcctggccaacatggt

SEQ ID NO: 406 - DNA, 601 bp, Human
tgagggattgtgaagaagtaggaaggggagggatgtgggaggttaaagccaggcaggaatttggactttgccaaatgcagctagacctgcgctgtccaaaacattggccaccagccacatgtggctattgagcacttgaaatgtggctaatgtgactgaggaactgaatttttaattttatgtaaaaaccaaagctgtatactttttaaattaaatgtaactttaatattttggtaggactacatttctctttttagcattgcaaatctagcacccaaattgaggtgggctggctgggcayggtggctcacgcctgtaatcccagcattctgggaggccgaagcaggcagatcacttgaggtcaggagttcgagaccagcctggccaacatggtgaaaccccgtctctactaaaaataaaaaaaataaaaaaatagccgggcatgttggcacaggcctatagtcctgtctactagggaggctgaggcaggagaatagcttgaatctgggaggtggaggtttcagtgagccaagatagtgccactgcactccagcctaggtgacagagtgagactatctctcaaaaaataaaattaaaatta

SEQ ID NO: 407 - DNA, 601 bp, Human
tttctttctgctcttaatccaccttgttaccaccttctaatcttaataacatcctatttgcatctaacctagtggctcctgattcctgtatcaaatgctttaactcctccagggttctgttttttttttttttttgagagagagtcttgctctgtcacccaggctgctggagtgcagtggcgcgatctcggctcactgcaacctctgcccccgggttcaagagattctcttgcttcagcctcccaaatagctgggattacaggtgccagccaccaatgcctggctaatttttgtatttttrgtagagatggggtttcgccatattggccaggcttgtctcaaactcctgaacttaagtgatctgcccacctcggcctcccaaagtgctgggattacaggcgtgagccactgcgcccgaccttcctccggggttctttctctgatgacctcattccctcaggcttcagtgcccactgcctcttccccacaggtgatacccatcgccttgctgagcctcctattccggtgctcgatcactgaggctcaggcacacctggctgcagctccttctgtctgtgaggctgtcaggagtgctcttgct

SEQ ID NO: 408 - DNA, 601 bp, Human
ctgggattacaggtgccagccaccaatgcctggctaatttttgtatttttagtagagatggggtttcgccatattggccaggcttgtctcaaactcctgaacttaagtgatctgcccacctcggcctcccaaagtgctgggattacaggcgtgagccactgcgcccgaccttcctccggggttctttctctgatgacctcattccctcaggcttcagtgcccactgcctcttccccacaggtgatacccatcgccttgctgagcctcctattccggtgctcgatcactgaggctcaggcayacctggctgcagctccttctgtctgtgaggctgtcaggagtgctcttgctgggccaggtcagaagcgcactgcggaccccctcgagatcctagagcctgacgttcagtgaacccatgtttctgggtgggtgaaaggggcccaaccctgcccacttcagcccagcccgcccaaggggacttgtgccagcagaacatgtgggaggaagaagccccgtttccagggcatccgcagcccagggtagggagaaatattctctccactttgggggagagttcttgctctcgacctagtggtttcta

SEQ ID NO: 409 - DNA, 601 bp, Human
gacaggaaaccaacgcagcttgaagccagtgacaagaaaaatcaagctggaaatatgcctcggggatcagtcaagagatttggagaggtggaaagaagctgtctgcctactgcctgttttgaaattagatttatttctgattaaggacaattctttcagcaaatatgtattacaagccttccttggacaagaaccagagatattaggttgaaccatataaaactgccatttttctatatcaaaagcaaccaaatattggccgttttaatggttcaacctaatacagtggtgaaaaaggcayaatatgtgcccacaagagcttacaatctaggttggaaaataaggtcaacaacaggaagcctggaccgactgacgactgccatccgtctcacaaagagacaaaatatttgaaatcaggattgctccggatggattttaagagtgctgcagccatattaaagcacagtggtggttaggaggaaacgctgatcaagtcaggggaaatgaacacgcaacacgcacatctgagggaaaaggtaatcatgaatgggcattgtgacttttactaaaggcagagcttcagagttggttcccttgagaa

SEQ ID NO: 410 - DNA, 601 bp, Human
cacaaagagacaaaatatttgaaatcaggattgctccggatggattttaagagtgctgcagccatattaaagcacagtggtggttaggaggaaacgctgatcaagtcaggggaaatgaacacgcaacacgcacatctgagggaaaaggtaatcatgaatgggcattgtgacttttactaaaggcagagcttcagagttggttcccttgagaaacccaggtgtacccggttcctgttcgccagagctgtgaacgctttcaggcagtcactctgggcacacctggacatcataaaatgcggarcttctcccaggggaggggatgctgaggcttcaggtactagtgaatcaggcagaaccaatgagaggcaaacagagctgggctgagaggagaaaaggcatacttgtaccttctggatttttcaggcttcgaagacaagatacagaaacaggtgaactcacaagaatatctccaaggattgttgcaagctccctcgtgtctacactagtgacatccagtttcctgtcagagggagacatgcccttccccattatcgccagcagggggaagtagagagcagcatcgttgcatgccggcacctgc

SEQ ID NO: 411 - DNA, 601 bp, Human
attggaattcaacagaattcaaatgtttaagaaaatgtattctggatatcagccatggccatacttggaaatacgctagtatagacggcaattctattaatcagaatatgtgattctcagaacatccccaccccagactacaccaaataacagatattttattgtgtccatatgctccaactactttaaaaaagaaaagctcaagtgatatcttccatactttcatctaaatcttttcatttgagcctgctctatgaaacaggtggaagaggtattaatctcttcactttcccaccctatyttggaataacctgaaccttgggtatcaagtgcagcccaagagtgagggctggggggaggcagggttcccactcctatcagtctaaggctggccttctgattccggtttcctatctgcaaactcacctccaccctgaaggaccggtgatggatacttgcccctcctacaaggaagacacaacccctacctctaaagcacaagcacttgagaacacaaccccatagcaactgccctatgtaagccattgagggacatgtcttctgggccgacgcatggtctgcatgaatggtgctccccgaa

SEQ ID NO: 412 - DNA, 601 bp, Human
ggcaattctattaatcagaatatgtgattctcagaacatccccaccccagactacaccaaataacagatattttattgtgtccatatgctccaactactttaaaaaagaaaagctcaagtgatatcttccatactttcatctaaatcttttcatttgagcctgctctatgaaacaggtggaagaggtattaatctcttcactttcccaccctattttggaataacctgaaccttgggtatcaagtgcagcccaagagtgagggctggggggaggcagggttcccactcctatcagtctaakgctggccttctgattccggtttcctatctgcaaactcacctccaccctgaaggaccggtgatggatacttgcccctcctacaaggaagacacaacccctacctctaaagcacaagcacttgagaacacaaccccatagcaactgccctatgtaagccattgagggacatgtcttctgggccgacgcatggtctgcatgaatggtgctccccgaaggaggctacttcccgctctccttctctgcccttttcattgtaagtcatctttcctcaagagcattttcatgtactcttctcagccc

SEQ ID NO: 413 - DNA, 601 bp, Human
ttcatttgagcctgctctatgaaacaggtggaagaggtattaatctcttcactttcccaccctattttggaataacctgaaccttgggtatcaagtgcagcccaagagtgagggctggggggaggcagggttcccactcctatcagtctaaggctggccttctgattccggtttcctatctgcaaactcacctccaccctgaaggaccggtgatggatacttgcccctcctacaaggaagacacaacccctacctctaaagcacaagcacttgagaacacaaccccatagcaactgccctrtgtaagccattgagggacatgtcttctgggccgacgcatggtctgcatgaatggtgctccccgaaggaggctacttcccgctctccttctctgcccttttcattgtaagtcatctttcctcaagagcattttcatgtactcttctcagcccctcccaccttctacctatgtggagtttacagtgtctggcactgactgtgttgctaaagaggccacagaggcagccaagtgtaacctgctggcagaaaaggtgagtgggccgggaccttggggtgttaccactcggacagagctgtttgt

SEQ ID NO: 414 - DNA, 601 bp, Human
gtgagcgcctgtagtcccagctactcgggaggctgaggcaggagaatggtgtgaacccaggaggcagatgttgcagtaaactaagatcgtgccactgcactccagcctgggcaacagaacgagactctgtctcaagaaaaaaagaaaaagaaaaagaattcatcagtgacatttgacagaatatatctataaaaatgatttattatggatataaagagaccaaaaaagagagatctgtatgtccaacaggaaggtgtcattgaataatccatgcacatcagtaaatagaaaattgtgcagmcactaaaaattgtgttttcaaggaataatgaatgatatgagaaaatgctattatggcaagtgaaaacacacaggatacaacatcgtatagtcacaatgatctcaatttttaaatcatatttaatagtattttaaaataagaaagaaatgcatcaatgttaacagtccttctttctaggccaccaccagaaagggattatgggtaatctctctcactctcaaagtatttctgtatttccatgttatatatagaatcatatacctcccacaagcagaaactataactttaagaaaaatggtt

SEQ ID NO: 415 - DNA, 601 bp, Human
aacagtccttctttctaggccaccaccagaaagggattatgggtaatctctctcactctcaaagtatttctgtatttccatgttatatatagaatcatatacctcccacaagcagaaactataactttaagaaaaatggtttttcaaactaatttaaggttggcgcgtcaatgaaattgggggggatccatttttgaaattagttaaaataaatcctctttctctgtgggcagcaatatggcttttgtaaggcaacactcagtgagaagcttggtggggcagaggttgcagtgacctgcayggtgttccaaacacaggtaacagctccgtgaatattcttgcctacaccttcagaatacaatgaccccttcacatttatgcagtgcagtagtgatgacaggacatttgctctcccgtgcttctgaatctcacagtatgaaataacactggggtatgcggaatcatcaacaaatggaaggatattttagctatgcctttccctcccacgaactagtgactacagggaagaaccatcttactgtgtagttgacaaagccacctttttatttgtgggaggtgggagtggttttctgagttgcag

SEQ ID NO: 416 - DNA, 601 bp, Human
gaaactataactttaagaaaaatggtttttcaaactaatttaaggttggcgcgtcaatgaaattgggggggatccatttttgaaattagttaaaataaatcctctttctctgtgggcagcaatatggcttttgtaaggcaacactcagtgagaagcttggtggggcagaggttgcagtgacctgcacggtgttccaaacacaggtaacagctccgtgaatattcttgcctacaccttcagaatacaatgaccccttcacatttatgcagtgcagtagtgatgacaggacatttgctctccygtgcttctgaatctcacagtatgaaataacactggggtatgcggaatcatcaacaaatggaaggatattttagctatgcctttccctcccacgaactagtgactacagggaagaaccatcttactgtgtagttgacaaagccacctttttatttgtgggaggtgggagtggttttctgagttgcagagaccaggtggccagatctacctgttagctcccagtggctgcagcttcagatgacaaagagggtggcactgctgggcaagggtgagccataggtggggtgcttttactcattgg

SEQ ID NO: 417 - DNA, 601 bp, Human
tgaatctcacagtatgaaataacactggggtatgcggaatcatcaacaaatggaaggatattttagctatgcctttccctcccacgaactagtgactacagggaagaaccatcttactgtgtagttgacaaagccacctttttatttgtgggaggtgggagtggttttctgagttgcagagaccaggtggccagatctacctgttagctcccagtggctgcagcttcagatgacaaagagggtggcactgctgggcaagggtgagccataggtggggtgcttttactcattggacatatgygtgtaagtccaccatcacaaagacaatcctagtgaggccggggccaacataggccagtcacccctccttgtaaccttgatgacaatcccttgtacttaggtaggtcctttcttgctagactctttgcaaataaaaatgtataatgtgaggaaattgggtgccagtgccacctgggcctgtgggttgtcttgcctgggaggaggaagcaaactaactgaaggaaatggtcctttttccagcccgtgacctcacagccccaaccagaaggtgccaatgaagcagtccccacccccgtggtgg

SEQ ID NO: 418 - DNA, 601 bp, Human
cagggaagaaccatcttactgtgtagttgacaaagccacctttttatttgtgggaggtgggagtggttttctgagttgcagagaccaggtggccagatctacctgttagctcccagtggctgcagcttcagatgacaaagagggtggcactgctgggcaagggtgagccataggtggggtgcttttactcattggacatatgtgtgtaagtccaccatcacaaagacaatcctagtgaggccggggccaacataggccagtcacccctccttgtaaccttgatgacaatcccttgtacttrggtaggtcctttcttgctagactctttgcaaataaaaatgtataatgtgaggaaattgggtgccagtgccacctgggcctgtgggttgtcttgcctgggaggaggaagcaaactaactgaaggaaatggtcctttttccagcccgtgacctcacagccccaaccagaaggtgccaatgaagcagtccccacccccgtggtggacccagatgcacctccgtcccctccacttggcgcacctggactccctccagctggctcacccccagactcccatgtgttactggcagctcctccagga

SEQ ID NO: 419 - DNA, 601 bp, Human
ctgctgggcaagggtgagccataggtggggtgcttttactcattggacatatgtgtgtaagtccaccatcacaaagacaatcctagtgaggccggggccaacataggccagtcacccctccttgtaaccttgatgacaatcccttgtacttaggtaggtcctttcttgctagactctttgcaaataaaaatgtataatgtgaggaaattgggtgccagtgccacctgggcctgtgggttgtcttgcctgggaggaggaagcaaactaactgaaggaaatggtcctttttccagcccgtgasctcacagccccaaccagaaggtgccaatgaagcagtccccacccccgtggtggacccagatgcacctccgtcccctccacttggcgcacctggactccctccagctggctcacccccagactcccatgtgttactggcagctcctccaggacaccagttgcaccgggcgcactacgacctgcgccacaccttcatgggtgtggtctcattggggtcaccctcaggagaagtgtcgcacccccggaaaacacgcacagtggtgcagcctagtgttggtgctgctgctgggccagtggttcc

SEQ ID NO: 420 - DNA, 601 bp, Human
tggacatatgtgtgtaagtccaccatcacaaagacaatcctagtgaggccggggccaacataggccagtcacccctccttgtaaccttgatgacaatcccttgtacttaggtaggtcctttcttgctagactctttgcaaataaaaatgtataatgtgaggaaattgggtgccagtgccacctgggcctgtgggttgtcttgcctgggaggaggaagcaaactaactgaaggaaatggtcctttttccagcccgtgacctcacagccccaaccagaaggtgccaatgaagcagtccccacmcccgtggtggacccagatgcacctccgtcccctccacttggcgcacctggactccctccagctggctcacccccagactcccatgtgttactggcagctcctccaggacaccagttgcaccgggcgcactacgacctgcgccacaccttcatgggtgtggtctcattggggtcaccctcaggagaagtgtcgcacccccggaaaacacgcacagtggtgcagcctagtgttggtgctgctgctgggccagtggttcctccatgtccggggaggatcagacacttcaaggtctaggctaga

SEQ ID NO: 421 - DNA, 601 bp, Human
tgagggcagactccacctcggcggaaaccccagatgtggacagacatacctctcagctaagatgccagcacatttttcagcccccagattattttccagacgcatcctctccctgcccctgttccccagcccagctgctgtcctgagccccaggagacaacctcccccttccaagacaccttccccacagcgcccccagccaggccttggttttcctggtgcggctgggatctttcaggggccagggctgcagacccaagatgtggttcttgcccatcgttccctcctcttacggactggrttgggataggggtggaggctctgcttcctggttccatcctcctccaggccaggtttacaggtctggtttgaatgaagggaagaaagcaaagggaagaggaaagtttctgtgagctgtcttcccagaggccttattcccagaagtgtcaggctcctgaacccacactttcctctgatccgattttactccttagccccaggcctaaggcaaaagctgggcatcctgggggcataacaggattggggtggtagagaaggataggaggggacaggtcctagcagggaggggagctttgagggg

SEQ ID NO: 422 - DNA, 601 bp, Human
aagaggaaagtttctgtgagctgtcttcccagaggccttattcccagaagtgtcaggctcctgaacccacactttcctctgatccgattttactccttagccccaggcctaaggcaaaagctgggcatcctgggggcataacaggattggggtggtagagaaggataggaggggacaggtcctagcagggaggggagctttgagggggtgctcttgtcatgggaaactgagctgccacagagatctgagtcacaggaggtgttaaggatagattgcaacaattatgacacaacatcatgcktgcttataagactacaaaatagtgtattttgcattttgttttctgtctatgaagtcaaaagggttagagttactcccctcatgttgctgatgggggaatgaaagctcagaaaaagagggtcccctgtataaagtagcccagcagttcaggagcagggaagagaaaggggtgaagggctgggctcttgacctaacacctcctactcagacgggactgaagggagacctctgagagtgagctgctcactgtcaggtctcgtgaggctggaaacagcatccctgcaggtagggggatggctga

SEQ ID NO: 423 - DNA, 601 bp, Human
ggctgggctcttgacctaacacctcctactcagacgggactgaagggagacctctgagagtgagctgctcactgtcaggtctcgtgaggctggaaacagcatccctgcaggtagggggatggctgagttgacttctgaagaaggtgccctaggctactctttcattgctgctgggaaggctcattcccctaccctggtccttacctctccaataccctggtgagggagcgggcctactgaggagacaggcaagcctttgacactcaaagttaaaatcagacacaactggattcaaatatarggtctgctattagctggtgatctggagttggacacttggttatccccaatacatgtccttatctgtaaataaggatcataagctctatcacatagggttatggaggggattgagacactggcccctgaaatggcaactttagtcactttagtcaaatggcagaactgacccatttgtccttggggatccagaagtgttttccagggctgcaggatagtatgagagaggggctgttggagaccctgggtctctgtactctagtgaatggcaggtggagtccagggctgagccttgatcagt

SEQ ID NO: 424 - DNA, 601 bp, Human
tgtttttgtgaccctgcatatgatactgtgtctgtgggagggtctgtgtgtgtgtgtgggggggcgggcatcttggtgtgtgaatgggtgtcaactagtgtgtgtctatatgtgcaggagagatagtgtgcatgtgagagtgtctgtgtgttcctctgtgtgtgtgtgttggggacagtgtctcagcatgcgactgtgtacctggcagtctgtgagtgattgtgtgtggtgggagagagtctgtgtcagtgtctcagtattgggaatgtgcttgggggcgtgtgtgatgatgcgtgtgacmgtgtgtccacgtgggggtttttgtgactgtaagaacatgtgtgtagtattccttttcctgtcctttcgttcagatatctaaagcccttagggaaaaaaaatggattgtaagctctgagcttttgaaaaaaaagaaagaaagaaagaaaaacaaggggcggtcaaagagacaggggtctgttgatggaaggggtgatttgacttctgggaggtgacacagaggaaggaggttggggtcctgggaggagatgccagggaacctgaagggctggacttagttgggggactccagaaatttgag

SEQ ID NO: 425 - DNA, 601 bp, Human
agcaaaatgttgttttaaattatgtatgggtcctacattttatacatggggctcttgggtcatttcagcatctgcagcctctgaaggacgaatatttataatttttaaggctgttcaggaaaaaactaaaaagaacgacaaccccaagacatagctgaaggaagtgcacaaaaacactcagaaggaatggtggattctcagtgggatgggtctgtttgggtctgtgtgctgaaaagccatttcggtgacctcactggaagtggaggctcagctctccctactcacaggtgagagggatccytcccattgcacgtgtgacttcagtgttctggaacctccctgaccccttcacctcatgtcctcaggactcttcctttgggtggatagaagctgggttgaatattagatttggttgctgtgtcagaggggagcacggggagggggtggggggggctgtgttgagtgcatctgtaagtgagtgcgttttggaggaggaatgctaatggcagacatcccagctctttgtagccctgaacgccactactctccccggcccccgcacaccttgcgatattctaccatggtcactgatctgaaggac

SEQ ID NO: 426 - DNA, 601 bp, Human
tagctgaaggaagtgcacaaaaacactcagaaggaatggtggattctcagtgggatgggtctgtttgggtctgtgtgctgaaaagccatttcggtgacctcactggaagtggaggctcagctctccctactcacaggtgagagggatccttcccattgcacgtgtgacttcagtgttctggaacctccctgaccccttcacctcatgtcctcaggactcttcctttgggtggatagaagctgggttgaatattagatttggttgctgtgtcagaggggagcacggggagggggtggggggkgctgtgttgagtgcatctgtaagtgagtgcgttttggaggaggaatgctaatggcagacatcccagctctttgtagccctgaacgccactactctccccggcccccgcacaccttgcgatattctaccatggtcactgatctgaaggactccagattctagccttaactctgcttcctgggggggctgtgcacccttgattcagttcctctcccactctggcctgtgtgtcttcttctagaatggttgaaagtgcaagaagccctcaggcaggctgactaggcgccagaaggagcttaga

SEQ ID NO: 427 - DNA, 601 bp, Human
tactccttcacctggataccttcctttctgccgaccaaaatcttccttttcttcaaagtccgcggaagcactgcctcctccagaaaatcttccccaggacttctgccatcatttggcccttactcgtttgctgtagtctgctttggggttgctgtcttatttctgtcttagctgtcttatctgtgtgtccttccctgcaccgccggccagccccccagctagagcctctcagagcaggcacccggcctttccatttttgtcctcagcacctcccagcctgtgcatggactgagggctccamaaacatatttataggaataaatgtttcagggagttcacaaggtggtttaaagagcacgggattggagcccgctgggcctaggttgaaatcctgactgtaattataacacgtgacctaaagaaggttatcttaagtgagatcagaaggaaggtaagctaacatttccctctaatctgtgaagtgcaatttaagaataggcccatagggatttttcattgagcacgtactatgttccattatctgtgtagcatatagtcttgatcccacaaaaccctatggggctggaaatactcctgtttt

SEQ ID NO: 428 - DNA, 601 bp, Human
caatggagaagccacccagcagggctgtggccacagaggggacaaagtcacaggcagacttcaaatcaaggcagggagggagcaggggagaacacccagcctctctctccctctgcccttccatcttctgccaatgcctcccactggcccaacccaacagaggccagggaagccgaggggtgctgtcccatggctcaggcttctagagttcagaatggagcagaggagtggtgatctgagaaacagcaaaagtcaaaacaatcaccagacccctgagctgggttgtgttaggagctagggwtgccactgagaccttagaggtgtgtgagtgtgtgcattggggagaaggggtaacccccctccatggagctgaaggtcggctcagcagcccaggcagtggtactgagggaggccagagccaccccttctgccaggagtgtggcggcattaggaaggcttccagggacaggtgacactggggccagacgtgaaagaacaggcagatgcagaagggaaaaggaagctcctccaaggaatgagggttccaggcagcaccctggacatggggccaggccacgggcctcggaactacgcagtgtcc

SEQ ID NO: 429 - DNA, 601 bp, Human
tgaggcctgaggatgtgaagggacatgctcaacatcccacagctggttgaaggcagaaccaggatttgaacttgagtctgtgttgttcagaacctgagctccttctcctaagccctgatgctctacagtacccttcaccctggccttgagctgatgccttcatttcgagcctggcctttgaccctcacctcactcccttggggaggccctgtgcctggcctctctgagtctcagcttctgcatctgtaaaatgggggcccagtagtccttgctggccacctcgttgccagggtgcaggagytaatggattcatgagcagctctccacagccctgagtgccagcatccacgtggaagggcggctgttagcttgattacaggcgccgcagcagcttccgggaggggaagtgtttaattgggggttttatttccagcagcagggtctggcttaatgaaatatccctgggcctcctggcatgtggctgccctgctgcctccctgtgttgacaagccttgagccaaatccctggctgtgatttaccagctcctcccaagtcagataaagctgggttgataagtagggctatgccctgacccacccc

SEQ ID NO: 430 - DNA, 601 bp, Human
ggttgataagtagggctatgccctgacccaccccacctccagccaaggtgggcatctggggatcatgggcccagccaggaaccagcctggcttttaatatttgatgttaatgaagggtaattgacagatgcacttgcacaggctcactgagcgagggacacagtgatcctttgactctgtgctagtaatgcacacatctgtgcacacaccacctccccaccctcccaactggctctgaacagagggagcaggaatggtgcagcggccgggggtccacactggcaagggggcctgctgggargagactgaatgttgagaaatctgagcccagaggaagggcagaggagaatggcacatgccacattctttcctattaacagcaagtttggctgctaacttgggacctccggaggcaaagagctggcggattttagtcttgactctgctactttctagttgatgatcttaggcaagttgtttggcttctcagaggctcagtttcttcatatgtacaatgggactaactgttcctaccttgaaaggtggttctaatgtccaaaggtgtcaggtgtacagtaggtgttcaaaaactgattctgtg

SEQ ID NO: 431 - DNA, 601 bp, Human
gcatctggggatcatgggcccagccaggaaccagcctggcttttaatatttgatgttaatgaagggtaattgacagatgcacttgcacaggctcactgagcgagggacacagtgatcctttgactctgtgctagtaatgcacacatctgtgcacacaccacctccccaccctcccaactggctctgaacagagggagcaggaatggtgcagcggccgggggtccacactggcaagggggcctgctgggaagagactgaatgttgagaaatctgagcccagaggaagggcagaggagaatgrcacatgccacattctttcctattaacagcaagtttggctgctaacttgggacctccggaggcaaagagctggcggattttagtcttgactctgctactttctagttgatgatcttaggcaagttgtttggcttctcagaggctcagtttcttcatatgtacaatgggactaactgttcctaccttgaaaggtggttctaatgtccaaaggtgtcaggtgtacagtaggtgttcaaaaactgattctgtgaaggcacagcctatggaaagagcaagtaaggagcatgttgtgaaggaatct

SEQ ID NO: 432 - DNA, 601 bp, Human
agtgctggaagaggctgtcaccagactctgcagtaaagttgtccctgccacattttttgctagggtgaaaaatagaactcccagactagatggttgcccctgtcctgcacccctgagggtcaggccctggggctgccacagtccccatcgtgtacacacacacacacacacacagacacataacacacacacacacacacacacacacacacacacaccccacattaatgaagcctcttctcaggagactcagttctttttttttttttttttttgaggcagagtctcactctgtcgcctrggctggagtagttagtggcttgatcttaactcactacaacctcctcctcccaagttcaagtgattttcgtgcctcagcttcctgagtagctgggactacaggcgcacgccaccatgcctggctaattttttgtatttttagtagagatggggtttcaccatgttgcccaggctggtctcgaactcttgagctcaggcaatccacctgcctcggcctcccagagtgctaggattacaggcatgagccaccacacccagccgagacccagttctgactgctgtctctccacatgaacactga

SEQ ID NO: 433 - DNA, 601 bp, Human
cacacagacacataacacacacacacacacacacacacacacacacacaccccacattaatgaagcctcttctcaggagactcagttctttttttttttttttttttgaggcagagtctcactctgtcgcctaggctggagtagttagtggcttgatcttaactcactacaacctcctcctcccaagttcaagtgattttcgtgcctcagcttcctgagtagctgggactacaggcgcacgccaccatgcctggctaattttttgtatttttagtagagatggggtttcaccatgttgccmaggctggtctcgaactcttgagctcaggcaatccacctgcctcggcctcccagagtgctaggattacaggcatgagccaccacacccagccgagacccagttctgactgctgtctctccacatgaacactgagcagccactgcccccagtgggcctctggtgccttctccattctctggccttcactccctccttcctcccacagctgggaaaactggtctttaaaatcttctagtcttttagaatgttgaactcttttaaagtttgtcctggctgcagcttctctccttggtccccctg

SEQ ID NO: 434 - DNA, 601 bp, Human
acactgagcagccactgcccccagtgggcctctggtgccttctccattctctggccttcactccctccttcctcccacagctgggaaaactggtctttaaaatcttctagtcttttagaatgttgaactcttttaaagtttgtcctggctgcagcttctctccttggtccccctgttcttcctacaggtcaatatccccccaccctctcattgtgcccttttgtcccaagttcattggccctggtgtcaaacttaagttcccctacagagaggccaggaatgaaccatttcctcctggacrcaagtaagcagtggcctctatcagcctcacatcaaacctgaggccacaggccagccatctccctggtaggtggacatggggcatggtgggggacagcctctgctgggatgtgaatgggcacaggcaatgccccgccttgcctctgcagggcctgtgtttgatctctgttagtttccatctatgctcttcctttctcaggtcttttttgttttttctgtgtgagtcttgattctctgaagacagggacggtgccaccatcctcagacaggggagctccctgaggacgggggctggatccct

SEQ ID NO: 435 - DNA, 601 bp, Human
cttgcaggtaggtctgtgtctcctccatcagattagaacttcttatgggcagggctgtgtctctctctctctcagatcagtgctctgtcttccttcccttctcttgggaactcagtgccaaccttgttcccagggtctgctctccccaaggagtgtgggagggaggtgggcactgagtcctaaaaatcagaaatagcgagtgactgcggggcaggcacggctgctgctggtcggtgccagaccttgtcagtagtgtgatttgaggctggaggcagggacatggaactgagctaaactcctrtcatctcaaaggcatgaattcattaaactgtgtcctagggttgccgagaggcagggctgagggtggagctgaggagcccctgccttggtggccccctgtcttgtccctggaccaacagcgtatatgtcaggggaggaaggtccaggtgtgtgtgtgtgtgtttgtgtgtaaagaagggaaaaggatgtcactaactcagagtagtccattctgggggagcagggatagccctcagaatggggaggaaggggagcatctagcactgggcaggctgccctattctgggctgaggctcagggc

SEQ ID NO: 436 - DNA, 601 bp, Human
tctgtgtctcctccatcagattagaacttcttatgggcagggctgtgtctctctctctctcagatcagtgctctgtcttccttcccttctcttgggaactcagtgccaaccttgttcccagggtctgctctccccaaggagtgtgggagggaggtgggcactgagtcctaaaaatcagaaatagcgagtgactgcggggcaggcacggctgctgctggtcggtgccagaccttgtcagtagtgtgatttgaggctggaggcagggacatggaactgagctaaactcctgtcatctcaaagrcatgaattcattaaactgtgtcctagggttgccgagaggcagggctgagggtggagctgaggagcccctgccttggtggccccctgtcttgtccctggaccaacagcgtatatgtcaggggaggaaggtccaggtgtgtgtgtgtgtgtttgtgtgtaaagaagggaaaaggatgtcactaactcagagtagtccattctgggggagcagggatagccctcagaatggggaggaaggggagcatctagcactgggcaggctgccctattctgggctgaggctcagggccaggtctcccca

SEQ ID NO: 437 - DNA, 601 bp, Human
gtgtgatttgaggctggaggcagggacatggaactgagctaaactcctgtcatctcaaaggcatgaattcattaaactgtgtcctagggttgccgagaggcagggctgagggtggagctgaggagcccctgccttggtggccccctgtcttgtccctggaccaacagcgtatatgtcaggggaggaaggtccaggtgtgtgtgtgtgtgtttgtgtgtaaagaagggaaaaggatgtcactaactcagagtagtccattctgggggagcagggatagccctcagaatggggaggaaggggrgcatctagcactgggcaggctgccctattctgggctgaggctcagggccaggtctccccaccccagtgccgcagggccacgtgtaccggttctgcacagctgaaggcctctggctgcagaaggacaactccagcctgccctggagggacttgtcggagtgcgaggagtccaagcgaggggagagagtgagttgaggcggggttctgagccagggagcggggagccatgtcttggagcacttcactggagcaaagacccttggctttgatgggggcatctgtggtcatttcatccatctcc

SEQ ID NO: 438 - DNA, 601 bp, Human
ttgaggctggaggcagggacatggaactgagctaaactcctgtcatctcaaaggcatgaattcattaaactgtgtcctagggttgccgagaggcagggctgagggtggagctgaggagcccctgccttggtggccccctgtcttgtccctggaccaacagcgtatatgtcaggggaggaaggtccaggtgtgtgtgtgtgtgtttgtgtgtaaagaagggaaaaggatgtcactaactcagagtagtccattctgggggagcagggatagccctcagaatggggaggaaggggagcatctwgcactgggcaggctgccctattctgggctgaggctcagggccaggtctccccaccccagtgccgcagggccacgtgtaccggttctgcacagctgaaggcctctggctgcagaaggacaactccagcctgccctggagggacttgtcggagtgcgaggagtccaagcgaggggagagagtgagttgaggcggggttctgagccagggagcggggagccatgtcttggagcacttcactggagcaaagacccttggctttgatgggggcatctgtggtcatttcatccatctccttgcctc

SEQ ID NO: 439 - DNA, 601 bp, Human
ccaccccagtgccgcagggccacgtgtaccggttctgcacagctgaaggcctctggctgcagaaggacaactccagcctgccctggagggacttgtcggagtgcgaggagtccaagcgaggggagagagtgagttgaggcggggttctgagccagggagcggggagccatgtcttggagcacttcactggagcaaagacccttggctttgatgggggcatctgtggtcatttcatccatctccttgcctctgggggctttgcacaccatgctttctggacaaaggtggtgtgtattcaccwctctggccttggaacagggcccaagatatccaagaaccatcgccgtaggttacggttattctctttcttggtcttggtatccccggtgagtcctgacttggggccccagctctgtctctttgccatgggaaggaagattgtgggaagagggccatgggctgcccatgtacacgtatgtcccccgtgtgccacagagctccccggaggagcagctcctgttcctctacatcatctacacggtgggctacgcactctccttctctgctctggttatcgcctctgcgatcctcctcagcttca

SEQ ID NO: 440 - DNA, 601 bp, Human
gggagagagtgagttgaggcggggttctgagccagggagcggggagccatgtcttggagcacttcactggagcaaagacccttggctttgatgggggcatctgtggtcatttcatccatctccttgcctctgggggctttgcacaccatgctttctggacaaaggtggtgtgtattcaccactctggccttggaacagggcccaagatatccaagaaccatcgccgtaggttacggttattctctttcttggtcttggtatccccggtgagtcctgacttggggccccagctctgtctctktgccatgggaaggaagattgtgggaagagggccatgggctgcccatgtacacgtatgtcccccgtgtgccacagagctccccggaggagcagctcctgttcctctacatcatctacacggtgggctacgcactctccttctctgctctggttatcgcctctgcgatcctcctcagcttcaggtaaggtggcccggaccctgggagggggctgcttcatcctaactcccccagatagaggaatgaagcagcccaacaccaaatcaaagcaacagtgcagcacattcgtccttctctcaaga

SEQ ID NO: 441 - DNA, 601 bp, Human
tgattttagaaaagatcttggggattagagatcttcctccctttggagctcttcagccccagtggaaaagttcctccttagatctaacctagatgagacgttccttccaaactaggagctgggaacagagtaccaggttcttcccactcctctgcacttggagaaggggggccagggggactgggttcaaagagggaagggaatctgagagaatgagacctcaggacaccaggcagcaagagcaggagaggtggcattccctctcctaccttcaaagcacctggcacagtcctgggcacayggtgctcaataaatgcattcactcaatgaatattctcctcttttattatgaattattccagtgattcaaaaatgcaatgactgatactatgatcactcatgcacacaccatccagcctaagaaataacatgtcccatagttacacttctctgggtaaccctctctgatcccatccctctccctgccctacacccatcagaggtaagccctgaatgtgcctcttttaattccgacacatttccttgtacttttaccacatttatgagtagctatagaaatatatagcaaggttctgtgtat

SEQ ID NO: 442 - DNA, 601 bp, Human
taattgagaggctaaagtgggaagcctgcttgaggccagagattggagaccagcctgaccgatgtacgagaccattaaataaatacaattgtttatttttttatctggaaaaaaataaagaattaaaattcaaataaaaaaagagagaaataggaaggaagaaaggggtaactggtcccaagtaaatccagacttaatgggacaaacaacattaaatcttaaagcttgagaataatcttctttgactcagtgtcctgccttcctgatatggaggtgggagttgggtccccaagtctccccraagccccactcgcacagctttgctgggttcagctcatgtggcagctctcacaggctggagttgtgtgctggtggctctaccagtctggggtcttggaggagaatcttgccccccatgactctgctagtcattgccctagtcaggactctctgtagcggccccgcacctgtgccttaactactatagatttattagaaacctccactctgcctgggccctgaggctctccaggatatcctttgaaatctaggtcttcctggatttcaaagaagtagctatgttccctacagctcgtgcact

SEQ ID NO: 443 - DNA, 601 bp, Human
aggggtaactggtcccaagtaaatccagacttaatgggacaaacaacattaaatcttaaagcttgagaataatcttctttgactcagtgtcctgccttcctgatatggaggtgggagttgggtccccaagtctccccaaagccccactcgcacagctttgctgggttcagctcatgtggcagctctcacaggctggagttgtgtgctggtggctctaccagtctggggtcttggaggagaatcttgccccccatgactctgctagtcattgccctagtcaggactctctgtagcggccccrcacctgtgccttaactactatagatttattagaaacctccactctgcctgggccctgaggctctccaggatatcctttgaaatctaggtcttcctggatttcaaagaagtagctatgttccctacagctcgtgcactctgtgtgtctgtagagttagcaccacgtgaacactgccgaggtttactgctacgtcctccagagggacggcctgagttatacctgggcccacttgagccacagctagggtagccaaggagcactgcacccaagtgtagggagcagagacaggaggtggccctg

SEQ ID NO: 444 - DNA, 601 bp, Human
gggagttgggtccccaagtctccccaaagccccactcgcacagctttgctgggttcagctcatgtggcagctctcacaggctggagttgtgtgctggtggctctaccagtctggggtcttggaggagaatcttgccccccatgactctgctagtcattgccctagtcaggactctctgtagcggccccgcacctgtgccttaactactatagatttattagaaacctccactctgcctgggccctgaggctctccaggatatcctttgaaatctaggtcttcctggatttcaaagaagtarctatgttccctacagctcgtgcactctgtgtgtctgtagagttagcaccacgtgaacactgccgaggtttactgctacgtcctccagagggacggcctgagttatacctgggcccacttgagccacagctagggtagccaaggagcactgcacccaagtgtagggagcagagacaggaggtggccctgggcagtgacttccaatgcctcacagtgtcctgggctcctcccccaaaactgttctgctctcaagaccctgacatctggacctgaaagatctctgaagtgcattcagggtcat

SEQ ID NO: 445 - DNA, 601 bp, Human
agaatcttgccccccatgactctgctagtcattgccctagtcaggactctctgtagcggccccgcacctgtgccttaactactatagatttattagaaacctccactctgcctgggccctgaggctctccaggatatcctttgaaatctaggtcttcctggatttcaaagaagtagctatgttccctacagctcgtgcactctgtgtgtctgtagagttagcaccacgtgaacactgccgaggtttactgctacgtcctccagagggacggcctgagttatacctgggcccacttgagccrcagctagggtagccaaggagcactgcacccaagtgtagggagcagagacaggaggtggccctgggcagtgacttccaatgcctcacagtgtcctgggctcctcccccaaaactgttctgctctcaagaccctgacatctggacctgaaagatctctgaagtgcattcagggtcattcttccattttctacccatactaattttattaaatgttcacttggccacacccttggtattgtctcctgaacatgcttttgcattctttacaatatggtcagactgaaaattttccaaatcttta

SEQ ID NO: 446 - DNA, 601 bp, Human
gcctgggccctgaggctctccaggatatcctttgaaatctaggtcttcctggatttcaaagaagtagctatgttccctacagctcgtgcactctgtgtgtctgtagagttagcaccacgtgaacactgccgaggtttactgctacgtcctccagagggacggcctgagttatacctgggcccacttgagccacagctagggtagccaaggagcactgcacccaagtgtagggagcagagacaggaggtggccctgggcagtgacttccaatgcctcacagtgtcctgggctcctcccccaraactgttctgctctcaagaccctgacatctggacctgaaagatctctgaagtgcattcagggtcattcttccattttctacccatactaattttattaaatgttcacttggccacacccttggtattgtctcctgaacatgcttttgcattctttacaatatggtcagactgaaaattttccaaatctttaagttctccttctcttttgattataaatttcatctttcatttctctcttctcatattttgctataagcagtcaagggcagccatgctgtaccctcaatactttgcttaga

SEQ ID NO: 447 - DNA, 601 bp, Human
ggcagtgacttccaatgcctcacagtgtcctgggctcctcccccaaaactgttctgctctcaagaccctgacatctggacctgaaagatctctgaagtgcattcagggtcattcttccattttctacccatactaattttattaaatgttcacttggccacacccttggtattgtctcctgaacatgcttttgcattctttacaatatggtcagactgaaaattttccaaatctttaagttctccttctcttttgattataaatttcatctttcatttctctcttctcatattttgctatwagcagtcaagggcagccatgctgtaccctcaatactttgcttagagatttcttccaccaaatattctatttcattgctcataagtctttgctcccatgaaacacttggacatagacacaattcagccaagttatttgccactttgtaacaaaaagatggcatttcctctggtctccaatgccatgctcctcatttctatctcagacctcatcagaatggcctttactgttcatatttctaccattattatgttcacaaccacttagataatctctgtgaagattgaaatttttggccggg

SEQ ID NO: 448 - DNA, 601 bp, Human
aatattctatttcattgctcataagtctttgctcccatgaaacacttggacatagacacaattcagccaagttatttgccactttgtaacaaaaagatggcatttcctctggtctccaatgccatgctcctcatttctatctcagacctcatcagaatggcctttactgttcatatttctaccattattatgttcacaaccacttagataatctctgtgaagattgaaatttttggccgggcgcagtggctcacgcctgtaatcccagcactttgggaggccgaggcaggtggatcatgcrgtcaggagatcgagaccatcctggctagcatggtgaaaccccgtctctactaaaaatacaaaaaattagctgggtgcggtggcgggcgcctgtagtcccagctactcgggaggctgaggcaggagaatggcgtgaacctgggaggcggagtgagcagagcagtgagcagagatcgtgccactgcactccagcctgggcgacagagtgagactctgtctcaaaaaaaaaaaaaaagactgaaattttctacatagctctcatcttcttctgagctctcaccagaatcaccttgtatggccc

SEQ ID NO: 449 - DNA, 601 bp, Human
tggcctttactgttcatatttctaccattattatgttcacaaccacttagataatctctgtgaagattgaaatttttggccgggcgcagtggctcacgcctgtaatcccagcactttgggaggccgaggcaggtggatcatgcggtcaggagatcgagaccatcctggctagcatggtgaaaccccgtctctactaaaaatacaaaaaattagctgggtgcggtggcgggcgcctgtagtcccagctactcgggaggctgaggcaggagaatggcgtgaacctgggaggcggagtgagcakagcagtgagcagagatcgtgccactgcactccagcctgggcgacagagtgagactctgtctcaaaaaaaaaaaaaaagactgaaattttctacatagctctcatcttcttctgagctctcaccagaatcaccttgtatggcccatttgtggaaatatagacttttttctatcccaccacccagttcccaagctactgctacatttttaggtatttgttacatgactccccactctcggtaccaatttctatcttagtctgtgcctgctgttataacaaaataccttagactgggtaattt

SEQ ID NO: 450 - DNA, 601 bp, Human
ggcctttactgttcatatttctaccattattatgttcacaaccacttagataatctctgtgaagattgaaatttttggccgggcgcagtggctcacgcctgtaatcccagcactttgggaggccgaggcaggtggatcatgcggtcaggagatcgagaccatcctggctagcatggtgaaaccccgtctctactaaaaatacaaaaaattagctgggtgcggtggcgggcgcctgtagtcccagctactcgggaggctgaggcaggagaatggcgtgaacctgggaggcggagtgagcagwgcagtgagcagagatcgtgccactgcactccagcctgggcgacagagtgagactctgtctcaaaaaaaaaaaaaaagactgaaattttctacatagctctcatcttcttctgagctctcaccagaatcaccttgtatggcccatttgtggaaatatagacttttttctatcccaccacccagttcccaagctactgctacatttttaggtatttgttacatgactccccactctcggtaccaatttctatcttagtctgtgcctgctgttataacaaaataccttagactgggtaatttt

SEQ ID NO: 451 - DNA, 601 bp, Human
taggtatttgttacatgactccccactctcggtaccaatttctatcttagtctgtgcctgctgttataacaaaataccttagactgggtaatttttgaaaaatagaaatttatttctcataatttagagggtgggaagcccaagatcaaggcaccagtgggtttgatgtctagtaagggcttgctctctgcttctgagatggtgtcttctcactgtgtcctcacatgatggggaaggagtgaacactatgccctcacatcacagaaggcaaaagggcaaaaagggctcacaaactcacttrggcctcttttataaggacactaatcccattcttgagagcagagccctcatgatctaatcatcttctggaggcttcacctcttaatactatcattgcattaaggattaagttttatcatgaattttggaggaacacaacattcaaatcatagaaatatttttctataattttttggtccaacattatgtttgtgtgagattcattcacattgacacgagcagtcctgttttgtggatttttaaccaccattccatattccgttgtataatacagcacagtttatctgtcaaccttttaatg

SEQ ID NO: 452 - DNA, 601 bp, Human
aaaaatagaaatttatttctcataatttagagggtgggaagcccaagatcaaggcaccagtgggtttgatgtctagtaagggcttgctctctgcttctgagatggtgtcttctcactgtgtcctcacatgatggggaaggagtgaacactatgccctcacatcacagaaggcaaaagggcaaaaagggctcacaaactcacttaggcctcttttataaggacactaatcccattcttgagagcagagccctcatgatctaatcatcttctggaggcttcacctcttaatactatcattgcrttaaggattaagttttatcatgaattttggaggaacacaacattcaaatcatagaaatatttttctataattttttggtccaacattatgtttgtgtgagattcattcacattgacacgagcagtcctgttttgtggatttttaaccaccattccatattccgttgtataatacagcacagtttatctgtcaaccttttaatggacatttgagttgttctctttttttctttctgaattacaaatgttgggtgcaatgtacattcttacttgtgcatttctctggggcatataactagga

SEQ ID NO: 453 - DNA, 601 bp, Human
gcatattccagattcccaaagagatcaagcattttttttcatgattttttctgtgagttgctttttcatatcctttgcttactttttcattggcttatttgggtttttcttttctattttacatattcattatatattctggatacttatccaggatttaccctctctttagtctgtggcttattttttcactcattttatggttttttatgcacagaagttcttcattttaatggaataaagtttatcaatttagtattgataaataaaatttatcaataaagattaagcagttgataaacagttaattttattgattggtttaaaattattcattttttccaaagaacaaattctggacagtcttattaagaaatctttccttggctgggtgcggtggctcacgccagtaatcccagcactttgggaggctgaggtgggtggatcacaaggtcaggagatcgagaccatcctggctaacacagtggaaccccatctctactaaaaatacaaaaaattaggtgagcatggtggcacccgcctgtaatcccagctactcaggaggctgaggcgggagaatcacttgaacccaggaggtgga

SEQ ID NO: 454 - DNA, 601 bp, Human
gagatcaagcattttttttcatgattttttctgtgagttgctttttcatatcctttgcttactttttcattggcttatttgggtttttcttttctattttacatattcattatatattctggatacttatccaggatttaccctctctttagtctgtggcttattttttcactcattttatggttttttatgcacagaagttcttcattttaatggaataaagtttatcaatttagtattgataaataaaatttatcaataaagattaagcagttgataaacagttaattttattgattgstttaaaattattcattttttccaaagaacaaattctggacagtcttattaagaaatctttccttggctgggtgcggtggctcacgccagtaatcccagcactttgggaggctgaggtgggtggatcacaaggtcaggagatcgagaccatcctggctaacacagtggaaccccatctctactaaaaatacaaaaaattaggtgagcatggtggcacccgcctgtaatcccagctactcaggaggctgaggcgggagaatcacttgaacccaggaggtggaggctgcagtgagccgagatc

SEQ ID NO: 455 - DNA, 601 bp, Human
aaaagaaatctttccttaccctagtgtcataaagatggccgtctatattttctgtaagtttcagagttttgctcttccttgtggttctttgatctgcttggaattcatattgcgtatgatataaataaaggatttcatttttttttctgtatgtggaattagctgcctgagtaccatttattgatagcctttccttcccccttggtttgcaatgactgccattccatgcagcaaggctccacgtatgtatgggttggtttcagtcacctacagtttttttctgtttatctttccctgtccsgataccatggtgccttagctactgtagatttactagaaatcatatagcaaaatctcctcctctgtgattctttaggagtgtctggaatattcttagccctggctcttctttataagtttttaaagttctactttaaaaataaggtagaatttttatgaatacggagagacttgactcctttaaggtagcgagtctttctatctgtgaatgtgatgtatctatctcccactagtttaagtcttcgctaatgattttaagcaagatttataaaattctccatcgagatcttacctatcttct

SEQ ID NO: 456 - DNA, 601 bp, Human
aaggtagcgagtctttctatctgtgaatgtgatgtatctatctcccactagtttaagtcttcgctaatgattttaagcaagatttataaaattctccatcgagatcttacctatcttctgttagactcatttcaagctagttaattaaaaatattgcaaaagaattatttctaaacatttacttttaaatttttttaacgcaggcatatacaaacatacttatcagcaaccttgctaaactgtcttattagttctaataatttgtccatagatttcttgaattttctatgaagataatctrccatctacaaataataactattttgtttacttctgattcttgtacatttttcccttgccttattatagtgggcaggatctgtagttacaatgttgactagaagcagtgataacagacatccttattttgttcctgatttcaaaggaaatgctcccacagtttctcagttaagattgatatttgcccctggttaggtaaatagccttcattaggttaagaaatgcccctgtactttcaatttgctacacattttcacatgaaaggatattaaaactctatccaatagtttctgaattccta

SEQ ID NO: 457 - DNA, 601 bp, Human
ggatagtgaggattcaatgagctaaagcagataaagtccttagcactagccctagccagagatgtgagctctctcctcctgcattaaccatggcaggatagtggctggagcaggacggggagtggtatcaagagaggcagagggcagagctgttgtccccatgacacccttcctctacccccaggactctctgagctgccgcctggtgtttctgctcatgcagtactgtgtggcggccaattactactggctcttggtggagggcgtgtacctgtacacactgctggccttctcggtcttmtctgagcaatggatcttcaggctctacgtgagcataggctggggtaagaaccgccatcacccaccctggacctgtggcacgggggtgggagaccttgacccctcttctaacatggtacttggaacgcactgctgagcaaggggcaaggcccactgggtaaccctcttcctgggcacaggaccttctgccccggtgctgttaagatgccgtagggggttatggtcctcccctcctctgcataactctcctcccttaatggaagcctccaccgcatgtggccaaacaccaccctctaccact

SEQ ID NO: 458 - DNA, 601 bp, Human
gagtcctgggcctcaaggtggggaggggatcaagagggtagggggctggctggggggagcctgctggtgctctgtcacatgacgatgaagaggagggctcagaggagagccaagtacagtggggcaggggggccagaggccagccaaggaaagggtggacggcggatgtgcctggagcccagctggaaatgttctagccaaaaaagtttgccaagaaccattgtgtctttttttttgctggaacatttctggttgtgcttctgcctctcaccacgtgggattgtaatgaggggcagcattsgggttgggaagggggctgggatccccttcacccctgggaaaacatgcaacaggcctttctggagggacccacggtacccagagaataggccctgccctctgtcctccctaatctgccattgaatccatgagttttcctgttccacaccatcccccgccctgcttgccactccttcattcactcctccttccttcatgcgcccacctcacgctgctctgaccacggctgcccctgccacggacctccggggactttccagctcagtcacatccagactcctcttccctgacaatggtcctg

SEQ ID NO: 459 - DNA, 601 bp, Human
ggggccagaggccagccaaggaaagggtggacggcggatgtgcctggagcccagctggaaatgttctagccaaaaaagtttgccaagaaccattgtgtctttttttttgctggaacatttctggttgtgcttctgcctctcaccacgtgggattgtaatgaggggcagcattggggttgggaagggggctgggatccccttcacccctgggaaaacatgcaacaggcctttctggagggacccacggtacccagagaataggccctgccctctgtcctccctaatctgccattgaatccaygagttttcctgttccacaccatcccccgccctgcttgccactccttcattcactcctccttccttcatgcgcccacctcacgctgctctgaccacggctgcccctgccacggacctccggggactttccagctcagtcacatccagactcctcttccctgacaatggtcctgtccctgagcctttgcaaggctgttctccatgcaggaatgttcagggagcatccttcccacaccagggtgtccgctgcctcttcaggaagctgcctcaggccaccagtcctcgtggttctgtgctctct

SEQ ID NO: 460 - DNA, 601 bp, Human
ttccacaccatcccccgccctgcttgccactccttcattcactcctccttccttcatgcgcccacctcacgctgctctgaccacggctgcccctgccacggacctccggggactttccagctcagtcacatccagactcctcttccctgacaatggtcctgtccctgagcctttgcaaggctgttctccatgcaggaatgttcagggagcatccttcccacaccagggtgtccgctgcctcttcaggaagctgcctcaggccaccagtcctcgtggttctgtgctctctgccctctcaagytctccatcccctgtccttgcacttcatttatttttactggtgttcctcagccatttttctctatacagctccccccaccccccaggagaagagtagcctgagagattttaatgtgaccagtgtcttgaggacaccaaggcccagagctggcagggccttacaggcagagcaggccctggaacccaggcctcctgactcccaggctctgggcctgcggccatcatgccctgttctcttgcctgggctgcatcccttcagtcccctgcagcacccctgagcaggctcaggcctctgcacagg

SEQ ID NO: 461 - DNA, 601 bp, Human
agcctgagagattttaatgtgaccagtgtcttgaggacaccaaggcccagagctggcagggccttacaggcagagcaggccctggaacccaggcctcctgactcccaggctctgggcctgcggccatcatgccctgttctcttgcctgggctgcatcccttcagtcccctgcagcacccctgagcaggctcaggcctctgcacaggtgggcaggtaggcctggctcctgctcacagatccctgctcctcacctgcctcctccactcccagaacccagtcccttccttggccttttctcccygaggcttcttcctcctgctagagcaggaggagggaggccatcgagggcagctcagggaaggctgtcttcagggtgggggacggtgtctgtccattctaggaaatagcatcagcgctgttagtgcctgtcaccatggcgacccgagggcaggaacaatcaagggacgtgtgtgatgtgtgcagaggagcgggggtggctggagtttggtggggacacactgccctagaggtctctgagtgggagatgggggagggagtgccaagtccttttcctaccacctcacaccctagctcagggctc

SEQ ID NO: 462 - DNA, 601 bp, Human
tctcttgcctgggctgcatcccttcagtcccctgcagcacccctgagcaggctcaggcctctgcacaggtgggcaggtaggcctggctcctgctcacagatccctgctcctcacctgcctcctccactcccagaacccagtcccttccttggccttttctccccgaggcttcttcctcctgctagagcaggaggagggaggccatcgagggcagctcagggaaggctgtcttcagggtgggggacggtgtctgtccattctaggaaatagcatcagcgctgttagtgcctgtcaccatggygacccgagggcaggaacaatcaagggacgtgtgtgatgtgtgcagaggagcgggggtggctggagtttggtggggacacactgccctagaggtctctgagtgggagatgggggagggagtgccaagtccttttcctaccacctcacaccctagctcagggctcggggtctgtgggagcacaagggcaagacccggaggacaccctgctctaatcagaacacctttttcttgaggattggggtgggggagacggagagagattcacaggttgctaggagctcagacgtgatgccaggaggc

SEQ ID NO: 463 - DNA, 601 bp, Human
gccctcttgaaggtgcacagtggtagggaagagatgactgaaaggacatccagtgcctttaggagttgactggcaacgtgggctgaagcaagagagaaaatgggcatcagagggttcgcctgctccttgcctcatccgtcatgctgtccccaccgcatggcccagtcccgctgctgtttgtgtgtctgtggcctggtaacttagccgggactctgagggcaagtcctgacagtgtgcctggcacacaggaggtgggggactgatgactgatgaggacctctctgtaaggaagagtctgggrgtccgcatggggctcctgctgcctctgttctcccaggtgcccagaaaaaaactagaaaacatagttggaggccaggcaaggagaggggctggaagtgtgaggggcttggggcagggagaggcctcggcatgtagactgtggctctggcctgccagcccctctccccttctgtctttccctctctcttaggtgttcccctgctgtttgttgtcccctggggcattgtcaagtacctctatgaggacgaggggtgagtgtcctgctccaagggggcgggtgtgcccaggtccccatcctcaa

SEQ ID NO: 464 - DNA, 601 bp, Human
gttgagaggataaaggggggtaccaggagcttagaaggtgaatttagttctctaatctcccctccctgcccctgcccctgcccctgcccctgtcccaggattgtttgatgactaacggaactgggtctgtggggtacatggtgccctcctgcaggtttttctgtaatatctgcaagtgaaatgtttgtgtcattttgtatatgatgctgggtacacacatgactgtgttggtaggtccttgaaagcttgtttgggggctgtgtgcatctctgtgtatgactgtgtatttggactatgcgtrtgtgttgtgtggctgtgcactggcagggctctgtgggtccatgggactggtttttgggtggctcctgggagctgtgtgtgtggcactcaacatggccatgtgcattggcggcctctgtgcctgcacctgagctgggggtcctgtgagtcctgctggatgcatgtgtgcatctctctccctccccagctgctggaccaggaactccaacatgaactactggctcattatccggctgcccattctctttgccattggggtgagtgatggtgtcagggatgggagtggcagctatgatagggc

SEQ ID NO: 465 - DNA, 601 bp, Human
gcatcatgcagatggaaaaggtgggaagactgggacctggaggggtgatccctgcccaaagtcacctagttggagcagagccagaactagtatccccaggtgtcccaatacctgggccagtcttctctgtaagcacatgggacaagaagccttcctggatgtagctctgggtaccagcctggcattgcagctgccatctacttggtggcgagcaccctgccaggtgctttacatgcattgtgcatttactcctcacagaacccaggagatgtgcagggttagcctcactttacagaggagmctcagaggtgttaaaaccagagttacggtgtcacagtttcaaagaaaagaactgatcctctccactagcattagatgatgctaagggggtgtaaaaatacaaaaaaactggtccctgcccctcaagagtgtcatgagatgcctgcacacatgggggctcatgtgtgtgtatttacatacatgtgcagacatacagaacacaattctggagccctgggtctccttcatgaacagatggggctggagtggggaatattctccatgatcagagtcattgtacttcactggatcaggcctcctc

SEQ ID NO: 466 - DNA, 601 bp, Human
cagtcttctctgtaagcacatgggacaagaagccttcctggatgtagctctgggtaccagcctggcattgcagctgccatctacttggtggcgagcaccctgccaggtgctttacatgcattgtgcatttactcctcacagaacccaggagatgtgcagggttagcctcactttacagaggagcctcagaggtgttaaaaccagagttacggtgtcacagtttcaaagaaaagaactgatcctctccactagcattagatgatgctaagggggtgtaaaaatacaaaaaaactggtccctccccctcaagagtgtcatgagatgcctgcacacatgggggctcatgtgtgtgtatttacatacatgtgcagacatacagaacacaattctggagccctgggtctccttcatgaacagatggggctggagtggggaatattctccatgatcagagtcattgtacttcactggatcaggcctcctcaaggagaggttggatgtaggatctctacagcttctgggcagcttctgaggagggtctcctggaccccacagcacatgcctgggagacccatggggagaggctagctggggcctgtag

SEQ ID NO: 467 - DNA, 601 bp, Human
cctggatgtagctctgggtaccagcctggcattgcagctgccatctacttggtggcgagcaccctgccaggtgctttacatgcattgtgcatttactcctcacagaacccaggagatgtgcagggttagcctcactttacagaggagcctcagaggtgttaaaaccagagttacggtgtcacagtttcaaagaaaagaactgatcctctccactagcattagatgatgctaagggggtgtaaaaatacaaaaaaactggtccctgcccctcaagagtgtcatgagatgcctgcacacatgkgggctcatgtgtgtgtatttacatacatgtgcagacatacagaacacaattctggagccctgggtctccttcatgaacagatggggctggagtggggaatattctccatgatcagagtcattgtacttcactggatcaggcctcctcaaggagaggttggatgtaggatctctacagcttctgggcagcttctgaggagggtctcctggaccccacagcacatgcctgggagacccatggggagaggctagctggggcctgtagccaggcctagtcgcagaggtgcaaccctggtgttcc

SEQ ID NO: 468 - DNA, 601 bp, Human
aactgatcctctccactagcattagatgatgctaagggggtgtaaaaatacaaaaaaactggtccctgcccctcaagagtgtcatgagatgcctgcacacatgggggctcatgtgtgtgtatttacatacatgtgcagacatacagaacacaattctggagccctgggtctccttcatgaacagatggggctggagtggggaatattctccatgatcagagtcattgtacttcactggatcaggcctcctcaaggagaggttggatgtaggatctctacagcttctgggcagcttctgagsagggtctcctggaccccacagcacatgcctgggagacccatggggagaggctagctggggcctgtagccaggcctagtcgcagaggtgcaaccctggtgttccttcagaaaggaaatgagagggaagccactgccccattcctggatctgcctgggccgctggatttggggagggggttgttgaggatggagtcccaaagtgcttccgaccagggccagtctgcagggcacctccctcctgcttcctccctcttgatgtgactcttgtttccaggggctgatggtggccatcttatactg

SEQ ID NO: 469 - DNA, 601 bp, Human
cattagatgatgctaagggggtgtaaaaatacaaaaaaactggtccctgcccctcaagagtgtcatgagatgcctgcacacatgggggctcatgtgtgtgtatttacatacatgtgcagacatacagaacacaattctggagccctgggtctccttcatgaacagatggggctggagtggggaatattctccatgatcagagtcattgtacttcactggatcaggcctcctcaaggagaggttggatgtaggatctctacagcttctgggcagcttctgaggagggtctcctggaccccayagcacatgcctgggagacccatggggagaggctagctggggcctgtagccaggcctagtcgcagaggtgcaaccctggtgttccttcagaaaggaaatgagagggaagccactgccccattcctggatctgcctgggccgctggatttggggagggggttgttgaggatggagtcccaaagtgcttccgaccagggccagtctgcagggcacctccctcctgcttcctccctcttgatgtgactcttgtttccaggggctgatggtggccatcttatactgctttgtcaacaatgaggta

SEQ ID NO: 470 - DNA, 601 bp, Human
attagatgatgctaagggggtgtaaaaatacaaaaaaactggtccctgcccctcaagagtgtcatgagatgcctgcacacatgggggctcatgtgtgtgtatttacatacatgtgcagacatacagaacacaattctggagccctgggtctccttcatgaacagatggggctggagtggggaatattctccatgatcagagtcattgtacttcactggatcaggcctcctcaaggagaggttggatgtaggatctctacagcttctgggcagcttctgaggagggtctcctggaccccacrgcacatgcctgggagacccatggggagaggctagctggggcctgtagccaggcctagtcgcagaggtgcaaccctggtgttccttcagaaaggaaatgagagggaagccactgccccattcctggatctgcctgggccgctggatttggggagggggttgttgaggatggagtcccaaagtgcttccgaccagggccagtctgcagggcacctccctcctgcttcctccctcttgatgtgactcttgtttccaggggctgatggtggccatcttatactgctttgtcaacaatgaggtaa

SEQ ID NO: 471 - DNA, 601 bp, Human
gtgactcttgtttccaggggctgatggtggccatcttatactgctttgtcaacaatgaggtaagctctgaggagggacggtggggaccctggtgggtgggtaccatcagcccgtctggagtagtacaatggggactcccatcaatcttgccagctgaaaccccctactcacctcactgaggcactagggttgagaagccatcttgtccacagatttggttttctgtgcatggtctctctcacacatgaacacacacacacaagtacatgtacaggtataccctaatggcatgtgaccctarggaagacccagactcatgttaaggggatcctgaatgaccctctttgcttggtggtagtgactgtcacttacaaagtgattcaacacacacatacccaagccacatgcttggggctttaataatcactatctcatttaattatgacccccacatccctcaaaaaaaaccctgctaaaattcttatttcatattcccattttttatatatacatgagaacactgaagatcagaaagagtcaggaacctgccctaggtttggaaatagtggcacacatcgcttcttagccttttggctaaggt

SEQ ID NO: 472 - DNA, 601 bp, Human
tgtcaacaatgaggtaagctctgaggagggacggtggggaccctggtgggtgggtaccatcagcccgtctggagtagtacaatggggactcccatcaatcttgccagctgaaaccccctactcacctcactgaggcactagggttgagaagccatcttgtccacagatttggttttctgtgcatggtctctctcacacatgaacacacacacacaagtacatgtacaggtataccctaatggcatgtgaccctagggaagacccagactcatgttaaggggatcctgaatgaccctctttkcttggtggtagtgactgtcacttacaaagtgattcaacacacacatacccaagccacatgcttggggctttaataatcactatctcatttaattatgacccccacatccctcaaaaaaaaccctgctaaaattcttatttcatattcccattttttatatatacatgagaacactgaagatcagaaagagtcaggaacctgccctaggtttggaaatagtggcacacatcgcttcttagccttttggctaaggtgaagtgtggaaatagtggcatggcagagccaggattcaaattaatt

SEQ ID NO: 473 - DNA, 601 bp, Human
ctcacctcactgaggcactagggttgagaagccatcttgtccacagatttggttttctgtgcatggtctctctcacacatgaacacacacacacaagtacatgtacaggtataccctaatggcatgtgaccctagggaagacccagactcatgttaaggggatcctgaatgaccctctttgcttggtggtagtgactgtcacttacaaagtgattcaacacacacatacccaagccacatgcttggggctttaataatcactatctcatttaattatgacccccacatccctcaaaaaaaaccctgctaaaattcttatttcatattcccattttttatatatacatgagaacactgaagatcagaaagagtcaggaacctgccctaggtttggaaatagtggcacacatcgcttcttagccttttggctaaggtgaagtgtggaaatagtggcatggcagagccaggattcaaattaattctgcattaaagcagaaagtaccccattcttcatacacacaggcaagagccctggctcactgtggggaagggggtggctttctggtgctaggatgggagaagggggttctcgctggcccca

SEQ ID NO: 474 - DNA, 601 bp, Human
tggttttctgtgcatggtctctctcacacatgaacacacacacacaagtacatgtacaggtataccctaatggcatgtgaccctagggaagacccagactcatgttaaggggatcctgaatgaccctctttgcttggtggtagtgactgtcacttacaaagtgattcaacacacacatacccaagccacatgcttggggctttaataatcactatctcatttaattatgacccccacatccctcaaaaaaaaccctgctaaaattcttatttcatattcccattttttatatatacatgaraacactgaagatcagaaagagtcaggaacctgccctaggtttggaaatagtggcacacatcgcttcttagccttttggctaaggtgaagtgtggaaatagtggcatggcagagccaggattcaaattaattctgcattaaagcagaaagtaccccattcttcatacacacaggcaagagccctggctcactgtggggaagggggtggctttctggtgctaggatgggagaagggggttctcgctggccccacacactctcctgaaaatgtctgcaggacagcaggcctccctcccatccc

SEQ ID NO: 475 - DNA, 601 bp, Human
cccacatccctcaaaaaaaaccctgctaaaattcttatttcatattcccattttttatatatacatgagaacactgaagatcagaaagagtcaggaacctgccctaggtttggaaatagtggcacacatcgcttcttagccttttggctaaggtgaagtgtggaaatagtggcatggcagagccaggattcaaattaattctgcattaaagcagaaagtaccccattcttcatacacacaggcaagagccctggctcactgtggggaagggggtggctttctggtgctaggatgggagaarggggttctcgctggccccacacactctcctgaaaatgtctgcaggacagcaggcctccctcccatccctgagatggtcagctcctgggaggagggcatggctgtgttcatgggcacctggaaaaggccccttccaccaaggtactcagctttggaatcccagagctcagggatgttggagtcagcacattaataggcttgtctttttctatgggtgtgggggatgcagaaaggacagtgggtggggacctgggtgtttcaaggagctatgagatggctcaaagaagcaatgtgatgtagc

SEQ ID NO: 476 - DNA, 601 bp, Human
gtggccctcagatctctaaatgggagggaaaccaaggtctcttaagggtttactgcatataaggtgctcagagtgtctcattacatccaatgctgtgcagcagatggtatccccaattcacagctaagaacgttaagcctcagcaaaatgaaatgagtagcctaattcaatagacagaagatggtagagctagtgggctgtggcgggggcaagatcccacttaatgcctcagggaagcaggtgctggggaggtgaaggcagcgccaggcaaagagtggcccataaatgggattctggctgytcctgggacaggtcttagaggacccagcggctccgtttggagggtagggcagggaacaggctcgtgacccacaggaggcagtcctggtcctcctccactgccatatcctcaaaatgagtttctttaaaactgatgcaaacgaggaagtgcaaaaacctaagctctgtgggtggcctcccctccaggaatgctctcagccagctgggtgatgcgctacccagccctgagctctgctgctttccattccagcccagtggtgatgggggcaagacagggtggcatgtatcctgtgtggggatg

SEQ ID NO: 477 - DNA, 601 bp, Human
cacagctaagaacgttaagcctcagcaaaatgaaatgagtagcctaattcaatagacagaagatggtagagctagtgggctgtggcgggggcaagatcccacttaatgcctcagggaagcaggtgctggggaggtgaaggcagcgccaggcaaagagtggcccataaatgggattctggctgctcctgggacaggtcttagaggacccagcggctccgtttggagggtagggcagggaacaggctcgtgacccacaggaggcagtcctggtcctcctccactgccatatcctcaaaatgartttctttaaaactgatgcaaacgaggaagtgcaaaaacctaagctctgtgggtggcctcccctccaggaatgctctcagccagctgggtgatgcgctacccagccctgagctctgctgctttccattccagcccagtggtgatgggggcaagacagggtggcatgtatcctgtgtggggatgaggagcagaggcctgtagggagagactgaggctccctgctgccaccttgtcatcttgacccccccacgtccccgtttctcacttctctatcctctgacactgtcactgcagccctact

SEQ ID NO: 478 - DNA, 601 bp, Human
ctgtccacaagagctgttctgcagacccagggttgccatggcaatgccaggtacttgtgacctgaggagaaaagatggcttgaatattggttctgtgtggctgccaaggcctgcaccagctgctggtgggcgtgagtggggacagggagggggaggcctgaaggtggttttgctgtagcttgtgcctgagagccacagtgaggtgactcagagccctgagtgcttgtcccagccctgccactgccgagctgtgtgacctggggcaagtcattttgcctcccttgcctctgtctccccagcygtaaatgaaggtgaatgagcttcccaattcaccccgaatcctgaggctggcatggtgcctgctggagagggaggtcaggaggggtgtgctgcactgcagaggtcgagggcagggatgaggataaaaatccgatggtggaggaggaagtgtggtggcctaagtcccagcccaggtgctcagaatctgtggtgttgtctttgtgggttcattttcatagctgaggaacagaaggaacctgatgtgagatgctcatgcatttatgtgttcattcatttggttcatttaaaacacatgtactga

SEQ ID NO: 479 - DNA, 601 bp, Human
acctaattgttatcagtatggccatagtcacatttgtcacattaatcactttggcctcaatttttgcatctatacctatttatattaatttatatctatagaaatctttagaaaccaaactattaacagtcattacctatgtattgtttgaatattttcactgataattgcttttgtaatgaaaaaatacatttgtgaattgattaaaaattttattttcttacatttttaaaaagcctttattttttagagcagttttaggttcacagcaaaattgagaggaaggtacagagattttccrtagactccctgccccacacatttataaccccccattatcaactatcccccctcagagtggtacatttgtcacaattgatgaacccatactgacatatcattgtcactcaaagtccatagtttacattatggttcactcttggtgttgtatattgtatgaatgttgactgatgtatgtatagtgacctttatctgcagctgtagaaacatacagaagaatttcactgccctacccatcctttgtggccttcctattcctccctccttcttacctaactcctgggaactgccgatcttttta

SEQ ID NO: 480 - DNA, 601 bp, Human
tgattaaaaattttattttcttacatttttaaaaagcctttattttttagagcagttttaggttcacagcaaaattgagaggaaggtacagagattttccatagactccctgccccacacatttataaccccccattatcaactatcccccctcagagtggtacatttgtcacaattgatgaacccatactgacatatcattgtcactcaaagtccatagtttacattatggttcactcttggtgttgtatattgtatgaatgttgactgatgtatgtatagtgacctttatctgcagctktagaaacatacagaagaatttcactgccctacccatcctttgtggccttcctattcctccctccttcttacctaactcctgggaactgccgatctttttactgtttccatagttgtgcgttttatagaatgtcataatgtcatatagttggaataacatagtatatagtcttttcatactggtttctttcccttagtaatatgcatttatgtttcctccatgtcttttttttcctctttaaatttttatttttttagattcagaggttacaagtatggttttgttacatggatatgttgc

SEQ ID NO: 481 - DNA, 601 bp, Human
gatcttttggtacaggattatataattgttcttaatttttatatttaaacagtgataatttaatcagcagtgggcatttcccataagaagtctattcttttgcatcattttttgtgtaatgtgctaagggcatgtcttatatgatgatgttttgtatttggaggatcatgggaaaattcaggagatcatcaagccatcatcatgttgaagacaaattctttctaaaagtgctcagcgaaagcagtgttaatattttggtgttactctcttaaatacatattaaaatagcactttaatgttwgtttatataattgcacatccagatatttatttatcatttatactggatattatatttatcatttataatggaagctagaataatatgctttagaaaggaaaaataaaatattcagtgtttgtttccttttattaaaacataaatataaaatgtcagcttaaagagaaaacatgaagtgtgagtcttcaaaaagaaaagagatgtcagaaagtggagtaatttctacaaatgaatgcatcctcttgaatgtaacacattgtacaatggaagcacaaagttattcattagacactcactgag

SEQ ID NO: 482 - DNA, 601 bp, Human
actttaatgtttgtttatataattgcacatccagatatttatttatcatttatactggatattatatttatcatttataatggaagctagaataatatgctttagaaaggaaaaataaaatattcagtgtttgtttccttttattaaaacataaatataaaatgtcagcttaaagagaaaacatgaagtgtgagtcttcaaaaagaaaagagatgtcagaaagtggagtaatttctacaaatgaatgcatcctcttgaatgtaacacattgtacaatggaagcacaaagttattcattagrcactcactgaggacttagaaagttaaataattattgagcactacatggtttaatctcagatactttctattcatgtcttagtcaaaatgattacttttttctatgtgtctttttaatatcctaacagaatttatttatgtgataactgcgtttaacttgtcatatccaattactccttggagatttaagttgtcttgcatgccaccaaattcaacctatgactacttccttttgcctgctggactctcaaagaatacttcaaattcgaatggacattatgagacagctgttgaacctaag

SEQ ID NO: 483 - DNA, 601 bp, Human
ttaatatcctaacagaatttatttatgtgataactgcgtttaacttgtcatatccaattactccttggagatttaagttgtcttgcatgccaccaaattcaacctatgactacttccttttgcctgctggactctcaaagaatacttcaaattcgaatggacattatgagacagctgttgaacctaagtttaattcaagtggtactcacttttctaacttatccaaaacaactttccactgttgctttcggagtgagcaagatagaaactgctccttatgtgcagacaacattgaaggaargacatttgtttcaacagtaaattctttagtttttcaacaaataggtaagcattagctattttttaaatgtattgaacaatgttttttaattctttgatacctgtatgaaatagatgtcttatggctatgattttaacatacataatcatttttatatggataataaaattaggattcattatgtgaacaaactaataaataatttccaaattatcttgtatcccataaaaatataatgagggaattattttacttttaagtacattccttgtagtcttctaaatttgctttgaaatagaa

SEQ ID NO: 484 - DNA, 601 bp, Human
tcccataaaaatataatgagggaattattttacttttaagtacattccttgtagtcttctaaatttgctttgaaatagaaaaacacaccttatttttgttaaatgtataaaatatcaaatgactgataatattgttgaattggttaaattttaaaatattcatgaataataataattcttcaggcaaggaatatctctgaaagaatatacgttttaaagatgggtttttcagaaagaatagctaatggatgctgggcttaacacctaggtgatgtgatgatctgtgtaacaaactgctatrgtacatgtttacctatttaactaacctgcacatcctgcacatgtacccctgaactaaaaataaaagttggaaaaacaaaaaaagaaaagaaaaaaattctttttttttgtttaagtataatgcatactgattgtagctagtgtagttaaaaattctgcatctggaaatataaacaacaaaattatcccaagtcttttggaaaagctaggaagagtggagtcaattgactcatccatgtagagagacctccagtatgaaaatacaggcatatcttttcctcccttaaaagcgtgatgattg

SEQ ID NO: 485 - DNA, 601 bp, Human
gagtaattttccggtcacctctaatgtcagttcagcccataaatatgggtaagttatgcactaaaatgatgataataggtctaaacatcagtcatatataaaggttaaaaattgcttacaaaaatatttgctagcttatctcactttgcttaacactgtaatgatggtagatgtagtactgggggtattaagagtggcttctagaatgatttaacaatggtatgtatatctctgccattgtcacttaaattctgttttgaaaactgttttctttcaatcctggatctatgtaatggatgtrtattgattggatatcactttttcacatctcagataactatttttgaaaataattagaagcatgtttcttgcctgaatttattccttcaataaatatttcttagaggctcatgtttgtcagagactgctccaggagctggaaaaagagtgggacattagacatagttcccacctcagagagcagggacaaacaatagtaggcagagacaatgataaaagagtaaatgagtaatttactgtacaaacatgattacaaaaaacttcaaataatagacaacactctgttttctttgtgcaaaga

SEQ ID NO: 486 - DNA, 601 bp, Human
gttatgcactaaaatgatgataataggtctaaacatcagtcatatataaaggttaaaaattgcttacaaaaatatttgctagcttatctcactttgcttaacactgtaatgatggtagatgtagtactgggggtattaagagtggcttctagaatgatttaacaatggtatgtatatctctgccattgtcacttaaattctgttttgaaaactgttttctttcaatcctggatctatgtaatggatgtgtattgattggatatcactttttcacatctcagataactatttttgaaaatarttagaagcatgtttcttgcctgaatttattccttcaataaatatttcttagaggctcatgtttgtcagagactgctccaggagctggaaaaagagtgggacattagacatagttcccacctcagagagcagggacaaacaatagtaggcagagacaatgataaaagagtaaatgagtaatttactgtacaaacatgattacaaaaaacttcaaataatagacaacactctgttttctttgtgcaaagatcccccaaatctctttttatcaatttaaatatacaattacaaatgtgaataa

SEQ ID NO: 487 - DNA, 601 bp, Human
tatgcactaaaatgatgataataggtctaaacatcagtcatatataaaggttaaaaattgcttacaaaaatatttgctagcttatctcactttgcttaacactgtaatgatggtagatgtagtactgggggtattaagagtggcttctagaatgatttaacaatggtatgtatatctctgccattgtcacttaaattctgttttgaaaactgttttctttcaatcctggatctatgtaatggatgtgtattgattggatatcactttttcacatctcagataactatttttgaaaataattagaagcatgtttcttgcctgaatttattccttcaataaatatttcttagaggctcatgtttgtcagagactgctccaggagctggaaaaagagtgggacattagacatagttcccacctcagagagcagggacaaacaatagtaggcagagacaatgataaaagagtaaatgagtaatttactgtacaaacatgattacaaaaaacttcaaataatagacaacactctgttttctttgtgcaaagatcccccaaatctctttttatcaatttaaatatacaattacaaatgtgaataata

SEQ ID NO: 488 - DNA, 601 bp, Human
aataatacaggaaaatgttagcgctatgtatttaatttattaatttcatttaattatgtataatttagcagtttttctccacttatatttcctgaaacaattatatgcaaactctttatgtctgattttgcatcattggttttgacatcactagagctgcttttccaagtatctgatacaattttccatacaactcaagctttacttctttctaagttactcgagatatagcactttttgaaactgtgtatgacatcatattttaacatgaagactttcaaataatttgtcctgtagggayatagttgtgatctctacaacataattacaatggcatacaagcaattcaatcgtgaagttataccatagagaaaaaagttacaaaatctttattcaatatcattttcttttcttttcaaaactaattctacctgatgattttttagtagcatttagagtcaacattgagtgcattgtttttcaaaatgaagtaggtaagggaaagtgctgtggaatttttaagaacttgaaagctttcttaattttgtctttatgcagagataattttggggaaaagtatttccttctatttgaatatata

SEQ ID NO: 489 - DNA, 601 bp, Human
ttatgtctgattttgcatcattggttttgacatcactagagctgcttttccaagtatctgatacaattttccatacaactcaagctttacttctttctaagttactcgagatatagcactttttgaaactgtgtatgacatcatattttaacatgaagactttcaaataatttgtcctgtagggacatagttgtgatctctacaacataattacaatggcatacaagcaattcaatcgtgaagttataccatagagaaaaaagttacaaaatctttattcaatatcattttcttttcttttcaaaactaattctacctgatgattttttagtagcatttagagtcaacattgagtgcattgtttttcaaaatgaagtaggtaagggaaagtgctgtggaatttttaagaacttgaaagctttcttaattttgtctttatgcagagataattttggggaaaagtatttccttctatttgaatatatattataatatccccaaattatatgttccatgaaaaaaataaaactggtgtgatggagtgtcagggactattatttctactatgtagatcaaagaagatctcctttaggacatagca

SEQ ID NO: 490 - DNA, 601 bp, Human
tatgtctgattttgcatcattggttttgacatcactagagctgcttttccaagtatctgatacaattttccatacaactcaagctttacttctttctaagttactcgagatatagcactttttgaaactgtgtatgacatcatattttaacatgaagactttcaaataatttgtcctgtagggacatagttgtgatctctacaacataattacaatggcatacaagcaattcaatcgtgaagttataccatagagaaaaaagttacaaaatctttattcaatatcattttcttttcttttsaaaactaattctacctgatgattttttagtagcatttagagtcaacattgagtgcattgtttttcaaaatgaagtaggtaagggaaagtgctgtggaatttttaagaacttgaaagctttcttaattttgtctttatgcagagataattttggggaaaagtatttccttctatttgaatatatattataatatccccaaattatatgttccatgaaaaaaataaaactggtgtgatggagtgtcagggactattatttctactatgtagatcaaagaagatctcctttaggacatagcat

SEQ ID NO: 491 - DNA, 601 bp, Human
ctcgagatatagcactttttgaaactgtgtatgacatcatattttaacatgaagactttcaaataatttgtcctgtagggacatagttgtgatctctacaacataattacaatggcatacaagcaattcaatcgtgaagttataccatagagaaaaaagttacaaaatctttattcaatatcattttcttttcttttcaaaactaattctacctgatgattttttagtagcatttagagtcaacattgagtgcattgtttttcaaaatgaagtaggtaagggaaagtgctgtggaattttwaagaacttgaaagctttcttaattttgtctttatgcagagataattttggggaaaagtatttccttctatttgaatatatattataatatccccaaattatatgttccatgaaaaaaataaaactggtgtgatggagtgtcagggactattatttctactatgtagatcaaagaagatctcctttaggacatagcatttgagctgaatgaagaagagatatccatgcaaaaatccagagcaaaaggtgctccaagcaggaagaacaatattcacaaaatccctaagatacaatgaacttg

SEQ ID NO: 492 - DNA, 601 bp, Human
actgtggttttgaggaattctttacgttgttccaatgtaggcatacatacataaggggactccttcatggcctcccaactccattgtgttagggtttcacactagtaactccagtttgatactgataacttttacagtacgcagataggaaatgtacaatagcttgtaatattgtaattttacttttctttggtatatattgttttctctttggtcatggaaacacagtaaatttcacctgctgtttccagacttttgtgtttagctgtctctgctttaaagtaactgaaatttataataygtctcataaagtaaaacctcattgattttgactaaaagaggaaaattgtgaccaaattcttgaaaatatagaatgtgaaaattatcttatgctctttatttattgaaaataaaattcaaatcagtgtttcaatttaatgataatttctatatatatgaataattcctgttaattgtaaaaaccttgctaatatagagatgaacaaacaagaaaatgcatcgattttctatcactttggcgatctttatattttaactatatcaggaatccaagtataaatgtgtattaaactttcaaaat

SEQ ID NO: 493 - DNA, 601 bp, Human
ctgaaatttataatatgtctcataaagtaaaacctcattgattttgactaaaagaggaaaattgtgaccaaattcttgaaaatatagaatgtgaaaattatcttatgctctttatttattgaaaataaaattcaaatcagtgtttcaatttaatgataatttctatatatatgaataattcctgttaattgtaaaaaccttgctaatatagagatgaacaaacaagaaaatgcatcgattttctatcactttggcgatctttatattttaactatatcaggaatccaagtataaatgtgtrttaaactttcaaaatttaaacattaaacatttttaatattctgagaaacttcatccctacttctgatgacaagccagggactgctgatgctgcatttattgcatgggaatatttatgctgtcagttatttgagtaggtttgtctagattatagtgatctaaaattaatagacaagctgaattttgggtagttttgtgtatttccaaatagtgttctgcaaaatgcttttttcctttttaaccactaaaataattgaagtgggtgaggttcaggggagacttcagataagttttaggatgc

SEQ ID NO: 494 - DNA, 601 bp, Human
ttcaggtgaggggcaagagactggatggcccaggaatctggagtgactggagtactcctcgtgtctttaccacacaaggtaggttatgtaatagccacttctactgggagggaaatatatttcctgaacttgcctttgtatagtataagcatcttacattttgaggccttaaaatgaaaggaggaacacagtatcaacttccttgtttaaactttgaacaggccaatttgtgaattaaaattctgtcagagcctctaggcttgtgtgtttctattgcagtatattgtaggatcacttttcytattaaaaagaaaaaattaatataacagctccaaattaacaaactcagaaagccatttgtattgataattccttaatttacattttaaaaccaagcatatttatttgacataaaattcaaatattaacattttactttatattatataataaatgaattatttttactccagatgcttgcttttgagagttttcagtgccaatgttcatattttaaaggttatttttagcatcggaacatctacagttcattcacagcttcttcatgcagctgatgcgcaaagttttgcatagaggctcc

SEQ ID NO: 495 - DNA, 601 bp, Human
aaatgaaaaacttcagcttaatccatgaaaactcaattatattttttatttttaaataagaattattctgagacttttgaggcagttgagtaaggaggttgtggcgcatactgaaggtaggttaagataggttaatgtactaggtacttgtccacagtaagtaatgtacaagtgaagcttgagtgccacctcggctaggattatactcagtcacgctcataaatctaatggtctggctcctgtgcagtaattttatgctactaagttttttcctgtttctatttgattatggacatacaawacacaaatgttttgtatgaattgtaaatatatagacattgacgtttaccatgctattacagaataaagaaaacttaataaaaaccaattaaagtatttttgtttctgtttttaagggtaatcccaagatatgtgtgaaaacaaattttcatagtctatcaacagaaaatggtttaccttaactttacaactgaaatgtactgacgtttttgcagtgcactgtggtggaaataatttcttcctatgtaaaccatcatttacttgtatctcgcatgtctttgaaaatgataggcaaatgaaa

SEQ ID NO: 496 - DNA, 601 bp, Human
aacatattttatgatgaataagcctctgtgtttagaagatagtaaagacattcatggaagctcaactcactttagaatgagagcactcgggacactagataactgtacacaaacaggtaatttcagcattatccagtttttaaattacactcattttatttttggcagtgtaactctggaatgtgttgtgaatatttttcgatgtggtacaaattacttacagaatgttttgtcttcatctgatatcctttcttccctcattacagatgtcatatactttccacctaaaattctgacaagygttgggtctaatgtttcttttcactgcatctataagaaggaaaacaagattgttccctcaaaagagattgtttggtggatgaatttagctgagaaaattcctcaaagccagtatgatgttgtgagtgatcatgttagcaaagttacttttttcaatctgaatgaaaccaaacctcgaggaaagtttacctatgatgcagtgtactgctgcaatgaacatgaatgccatcatcgctatgctgaattatatgtgattggtaagaaaacagaggttttgttcattttgttccacaacttgaat

SEQ ID NO: 497 - DNA, 601 bp, Human
aatcaatcaattctgaaaaatttgtattttaactcttgaatgaaatgcaagaaaatgtagtttatatatattttaatttgacttagttgactagaggagaatgtgaaagattataaaagtttcgtatcatttggctaaagattaatgttttggaaaaaagaggtaaaaacagattataagagataatatgaatggtttttagaactgagtgagattacttaggaaataaatacttatggttaataaagggtaatgtgttctaatgagaagtaatttgtgcttgtttatttttactcttctrtgttttaaaaagaattcaaggcatcgtcttatagtggtccctttctttctaaaatcattttatctaaaatgatacaacccttgattatataatagatttttatttttaaaaatatcccatagtagtagtcaagtaaatatatactgctgttaaacactgtgtcccaatttatatttttatttgtagtggagactttcaatttgtataacatgctcatttattcttaaaatataaattttcaactagaaaaataaatcccttctctcaaatactgtgatctgaagtctattcctaatgctg

SEQ ID NO: 498 - DNA, 601 bp, Human
aacttccctaagcctcaatttccttgtctgtaaaacagagagaataataggacttacagtgtttctgcgagagttaatgacatatttcatctaattataatcacatggtataatttctccttgtaaatattcaatatatggtttttgctgtcatgataatgatgccaacttttcgatttcaagtgtactagtactgtgcttctactttgttcttattttctacccccagatgacccctcactcctcattttcatttttgcccacgcaccaccatttattcacacacacacacacacacaccttcatgattgtaattttgagaagacaagaaaaagaagtggtatagaaaatagaaaatgacagaagaatatagattttttagcttcttctaacttcctcactcccatctctttggaaagagtaattgctacttcagctatttaaatatagtattcagagcaaacattggcccaagaggttatttcaaagaagaggaaaaagactttatgtcaagtttgtccaacccatggcctggggcccccatgtggactaggatagctttgaatgcagcccaacacaaatttataaactgtctgaaaac

SEQ ID NO: 499 - DNA, 601 bp, Human
tttagctctgaaagcagcatcataaaaaggtgataggaaaacagggaagataacctttttctttgcatttctatgatttttacattacacctttaaacatgtcttgttatgtacatatacgtatctattttaaaaatcacttgctattcagaccatctttgcctctattactgcccattaaaagcctgttttcctcagattatagaaaaccaaggctttgctctgagagactatctctgaccttgacctagaaatatttaatgatacacagcagcataagagtttcacactcacacatatkgaaattgatgcagtccatgggttttttttttttttgcctttaattaaagttcaatggagaacagtttgttattgatatttagcatgtgttcagcatggtatctttttttttttttttgagacggagtctggctctgtcgcccaggctggagtgcagtggcgcaatctcggctcactgcaagcttcacctcccgggttcatgccattctcctgcctcagcctcctgagtagctgggactacaggcgcccgccaccacgcgtggctaattttttgtattttttagtagagacggggtttcac

SEQ ID NO: 500 - DNA, 601 bp, Human
gctaaatcagtttaggaaaccctgtatcactgtatcttccttgtgtagtcacggtatacatattacatattcaaggtttggagaggtccttcattaaagaaaaatttgtgaccttatttcatctcatgttccccaaactaatttttccaaggaactgttgtttctctaacatctgttgatatcttttagtacatacatgtttagtggaatgcattttggaagaagctgcttttcaaacaaacagagtcattcccgtagtggcaagtgtgcctatcatggcattccacatcagctttgtgayggcagcctgcaaagacctagaaatatcagaaacccttattgtatcattagatcacaatgatatcaactaaaacaaatgtgacagtttagctgctattgaagaatactgaatatcagcgatttgctacagtaggtcctatctaaccaatacgtttaaattctttttaaattcttaaaacatctttgtgggtagaggattagtggacagggattagtaggagggtaagagagtgtttgggaaacaaggttgcaagtaaaccagttcaaaatcttgtcatcatcagcaagggagtgacaagat

SEQ ID NO: 501 - DNA, 601 bp, Human
atgttctttttctggttcaggattccatccaggatagcagatttcatttagtagtcatacctccttatgcttctcttggttgcaaaagtttcttagatcttctttgtttttatgaacttgacacaattgagaagtactggtcgggtattttgtagaatctccatcaaatgggttttgtctaatgttttctcatgattaatttagggttatgtgtcatacctccttatgcttctcttggttgcaaaagtttcttagatcttctttgtttttatgaacttgacacaattgagaagtactggtygggtattttgtagaatctccatcaaatgggttttgtctaatgttttctcatgattaatttagggttatgggtttgggggaggaagatcacagatgtaaaatgccattccatcacatcatattaaggatacattctaccaatgtgacttaccatagttgatgttaaccttgctcgtctggctgaggtagtgttgtctggctgaggtagtgttgtctggcttcccactggaaagttactcttttttctcctttctccattttagttttaaaaatgaagtccccatgcttaaggagtaggagt

SEQ ID NO: 502 - DNA, 601 bp, Human
aacgattctgtatacttctgaaatggtgggtatatagcactatgcatttgccaaaactcctcgaacttcatagcacaaagagtgaatcttaatgcatgtagattaaaaagaaaatcatttaggaggttgaaggatcccaggattgactgtaaactgtgacaaaggaatctacctgtattacaagtgtatgaagcaacttcactgaaggtggtgggagaaaaggccactttggaacttgagtggagttgttggaaatgtgtggaatcttaagactaaaggcaaaagaaactgtacataagcactgtactctagttgatacagttctcacagggctatgggctaacaattatggtactgctctacatgtactctggaaggggacaagcaagtaaatggatggtggatggtgggacccagatttctcactgttggattgggaggttacacacaagcacaggatgatccatgtggcaatgaattagagttggggatataggtatgaacttatatctagcttaatatagatatagctagattctggtttaggatacatgtacattttcttgatttgtaaggtaagagggcctaaaagtaatgacat

SEQ ID NO: 503 - DNA, 601 bp, Human
atgtactctggaaggggacaagcaagtaaatggatggtggatggtgggacccagatttctcactgttggattgggaggttacacacaagcacaggatgatccatgtggcaatgaattagagttggggatataggtatgaacttatatctagcttaatatagatatagctagattctggtttaggatacatgtacattttcttgatttgtaaggtaagagggcctaaaagtaatgacatccagtagtaagacatgtgcccagacttgtttctaattaccatcgttcaataatagaaacaagrgctattggaagaaatggctaattttagggttggggcagaaaatatacgagattagcctggaggatcttgtagtaccagaaagtaaggaagcttaacattctcttacttgatggttaccaaaaaagtattcattaaaactgacatgtttttttttcaaataaaatgcaacatttgcatgactttgaaacatttctttcttgcggtggctgctaaaatcttactttcaacctatccagatgattccaagttttgcagggatacatgtatatgtgtttatttttctctgccatttctaactta

SEQ ID NO: 504 - DNA, 601 bp, Human
tgattggggaaatggggtacactgttaacctctgtggaatataagaatagaattgaactagacacttattttacattcggatctttaatgacctgatattattatttttaattatatgacagaaattctggggtgccatagacactgttttgatggcctctgttactcattaacctttgcagacattcttacattctagataatcttccaagagtatcagaggaaaggaaaatgaatgacaaatcttactatgatcaatatatgatgattaacaccttcacagctcttgttgttgcttttmattttctgagggttattccttgtttgctttttagatgaggaaactctctactccttatgtctttcatttctctaaaattagagtgaaacttcttggtagaaaagtgtcttgatcatatccctactttattatcttcaagtgatttattctctgggccttaagaaaaaaacctcaaaaaggggaaaataagtttgctatgctccataacgatccagacaccttcatggagactgtggcagaggcaaactctatcccacccatctccccagcctctcagccttgtaatagtacctgccctga

SEQ ID NO: 505 - DNA, 601 bp, Human
cattcggatctttaatgacctgatattattatttttaattatatgacagaaattctggggtgccatagacactgttttgatggcctctgttactcattaacctttgcagacattcttacattctagataatcttccaagagtatcagaggaaaggaaaatgaatgacaaatcttactatgatcaatatatgatgattaacaccttcacagctcttgttgttgcttttcattttctgagggttattccttgtttgctttttagatgaggaaactctctactccttatgtctttcatttctcyaaaattagagtgaaacttcttggtagaaaagtgtcttgatcatatccctactttattatcttcaagtgatttattctctgggccttaagaaaaaaacctcaaaaaggggaaaataagtttgctatgctccataacgatccagacaccttcatggagactgtggcagaggcaaactctatcccacccatctccccagcctctcagccttgtaatagtacctgccctgatctggcccctgcctcctaataagaaatgtagaatgagagttatgtgagctcagttagtataaaaagcactgca

SEQ ID NO: 506 - DNA, 601 bp, Human
gtctatttgcaaactgagagataagggcctgcaggaaaggaatataattttatgaaaggaatgaaaaaaaggaacctgacctggcattgagattcagagaagccaccttgaggaagtggtactgaactgaaatctgaaatgtgagtaggaattaaacttccccaaaagatgtaggggagggcaggaaaagcattggctcctaacaagagcagccagatcaaaagtctatggcacaggatagaaaatgaagaaagaccagggtggctttggtgtgggaaatcatggaaggcagagaggtgcrttgagacttggccctcagggccttgcaggcatgataggaattttaccctcaaatgtagaaatccgctggaggcttttaagtgggatgctgtgcagatggtgttaaaatgaacagatttgtgctttgagagtatcactccatcagtgggagaggatggttaataggcttgtgcagtattccatatgagaatgcctttttgaatatatcaaaaaattgctttttaaggttttagggagtatcatgtttctcttcaatgtcatctattcccatatctctctgtttaaatgactctcatgatgc

SEQ ID NO: 507 - DNA, 601 bp, Human
attttaccctcaaatgtagaaatccgctggaggcttttaagtgggatgctgtgcagatggtgttaaaatgaacagatttgtgctttgagagtatcactccatcagtgggagaggatggttaataggcttgtgcagtattccatatgagaatgcctttttgaatatatcaaaaaattgctttttaaggttttagggagtatcatgtttctcttcaatgtcatctattcccatatctctctgtttaaatgactctcatgatgcaaaagtaattgtcatgtatcatatttatttgtgtaaattrtctgtcttctcttccttattccctttagtaggttataagttcctcaagagtattagtagatttttattaatttttaatttaaaaattaatttccttcttttcccctcagtaaatatcgtgcagtcactcagtgcttatcctttaaacagcagttgtgtgattgtttcctggatactatcacccagtgattacaagctaatgtattttattattgagtggaaaaatcttaatgaagatggtgaaataaaatggcttagaatctcttcatctgttaagaagtattatatccatggtaagttt

SEQ ID NO: 508 - DNA, 601 bp, Human
ttctcttttcttttcttttcggcagggtctctctgtgttgcccaggctaaagtgcagtggaacaaacatggctcactgcagcctcaaccttctgggctcaagctatctttccacctcagcttcctgagtagctgagactatagacacacaccatcacacccagctaattaaaattttttttttttggtagagacaaggtctcactatgttgctcaggctggtcttgaactcctaagctcaagtgatcctcctgccttggcctcccaaagtgttgggattacaggcatgggccaccacaccyagcctaattctgtttcctttgacattttctcattttaacattttatacaggggttatcatatcatatcatatcatatatcctatcctatcatatcatatcaattttctcctcatttctttctaccattatttttaatgatatagcattttattccaaagtccacttaaactgtttgagattctttatgttgcttccagctttatcttttcttaaatcattttttaacagcttctgatatcttctgccaaattgtttcctcaaactgtgtaccaacttataatgccactaacaatgagtgg

SEQ ID NO: 509 - DNA, 601 bp, Human
aaatagagtcactgggcctcttatatttctgattcatcttactgtacttggaataccaacattttgattttgttattactttttaaattgtcttcaaatctaagcaacctagcaatgatatttcaagagataaacatttcatttgttgttagaataaaaatcattaaaaaaattcatacatgtattatccaacagatattaattgagcattgttctaagcactgtggattgaatagtgaacataagtttctgcccttatggatcttaaataccagtgctctaattgagagtgatgggcaawaaataattatataatgtcagatagaaataagtgccatgaaggaaaacaaaagcaagataaagggatggcattaaatgtggcactttagttgatagccagaaatggtctttctatggaggtggatgatattcgagtaaaaccttgcaagtacagtaagaccctacttgatatagtcaatagattcttggaaactgcaactttatgcaacatgaactacaggaggtccttgaataacatcattttgttcaaggtagtttcattataatgttgatgagaaaaaaaaggttttgttatacattg

SEQ ID NO: 510 - DNA, 601 bp, Human
tgctctgtcaaggacaacataacttcaaggaagaatttagttttttaaaaaaaatgtacatacattcaggaaacaacaagcttataacaggaaatcctaagcagtatgttcttggaggtggcaaaaatggctttcagagttctgcagtttgggttaaggacgttttgtggtgaagtgggtggtaaaagtagccttttagtggtgacctggagcagtcagttcatttatgatcagcaggcactctgctttttagagatcagcactgtgtggctccagtctgcttggcttgtcaggcaaatgsctgagttccgtggatggtggcatgggtgccatgatactctctgtgctgagaagtccagtgtggttattttacacatgccaaatctctgtagaaaccatcgtcttcaggcaaaaaagagagagaggagattttagaatctgaatttatcttgtagttaagtgagttgatggggccacatcaaatggaattttttctggtacccactttgtgaccatttttaatatttcaatttctttgagagaaatctatccagtgtttagcatggtgcttggcacacagctttcaataagtattggctat

SEQ ID NO: 511 - DNA, 601 bp, Human
atacattcaggaaacaacaagcttataacaggaaatcctaagcagtatgttcttggaggtggcaaaaatggctttcagagttctgcagtttgggttaaggacgttttgtggtgaagtgggtggtaaaagtagccttttagtggtgacctggagcagtcagttcatttatgatcagcaggcactctgctttttagagatcagcactgtgtggctccagtctgcttggcttgtcaggcaaatgcctgagttccgtggatggtggcatgggtgccatgatactctctgtgctgagaagtccagygtggttattttacacatgccaaatctctgtagaaaccatcgtcttcaggcaaaaaagagagagaggagattttagaatctgaatttatcttgtagttaagtgagttgatggggccacatcaaatggaattttttctggtacccactttgtgaccatttttaatatttcaatttctttgagagaaatctatccagtgtttagcatggtgcttggcacacagctttcaataagtattggctatttctattattacagtgattttcagcttgggtctagataaaagtttggtagaaatcttca

SEQ ID NO: 512 - DNA, 601 bp, Human
gcagtatgttcttggaggtggcaaaaatggctttcagagttctgcagtttgggttaaggacgttttgtggtgaagtgggtggtaaaagtagccttttagtggtgacctggagcagtcagttcatttatgatcagcaggcactctgctttttagagatcagcactgtgtggctccagtctgcttggcttgtcaggcaaatgcctgagttccgtggatggtggcatgggtgccatgatactctctgtgctgagaagtccagtgtggttattttacacatgccaaatctctgtagaaaccatcrtcttcaggcaaaaaagagagagaggagattttagaatctgaatttatcttgtagttaagtgagttgatggggccacatcaaatggaattttttctggtacccactttgtgaccatttttaatatttcaatttctttgagagaaatctatccagtgtttagcatggtgcttggcacacagctttcaataagtattggctatttctattattacagtgattttcagcttgggtctagataaaagtttggtagaaatcttcatgggctagcatgtgaaaatgcatctgaccctacggaggcat

SEQ ID NO: 513 - DNA, 601 bp, Human
agcctgttttcctctgcatcttataagatcgtttggtatcactgaggcagaagttattgctgtgtatttatatgctgcctaaatttggacatgttttatttcaagttagtgtcaatatcaatgtatcttacagttctcttctttgttagttattctataatgtagcaaaagaccaaaatgaatgttttaagccacaagagacagttctttgggacagttggtttcacttactaagtataacttcatattttaagagagggaatattggttttaaaagttaagccaagatttgaacataagwttggatcaaatgaaatttgtctttcttatcttcttatcaagctctcctttttggtatacatcaaatgctccactatttcttaaggaaataatgtagttttaagtctaacattagttatttaagagagtaaacgatattttctgaaacattaattttttgtttcaataattgattcgtttagaatataatgtattacaatgtagtgatactaaacattgaaagcaaaatacctaatctttcagtgttaatacctttcaaatttcaattattatttgaaggatttcctattgcagtatgtcc

SEQ ID NO: 514 - DNA, 601 bp, Human
ctaatctttcagtgttaatacctttcaaatttcaattattatttgaaggatttcctattgcagtatgtcctatttatacgtaagtgctttgtgaagggtaggtacttactgaattttgtggaaagagtgagtaggttaatgagaataaatttgtgaatttgtgttacaaaaatgaaaatattagagcaaaaaagaagttaaatgattgggggtcttaacagaaggtcactggagtccagaaatcctgccttccatcctgtagctcctccattattaagtagagacagatcaaatgaatttwaattaattaattaaacaatgttaaaattacctaaatgttcctattgggagagtacagccttgggtgactcttctaagatactgccctaatatagcagtgacagccagaatgctgacaaattccatgattcaaaattttacatatctgcaaatggttttgactgtaactttactaattccgatatgttttagctttacaaatgaaatgacttgctttcctaattagaaagaaaaaatgaaaccaagaggcaggaaatttattagggagtagatcctaggtccaggcagtttgaaaacaggc

SEQ ID NO: 515 - DNA, 601 bp, Human
taagctatttagttcagtgaaatggggacagcaagaaattgtggccaaaacataccaattgttggccagaagggaagtctgggatcaaagtgctttggatgttgggttaacaatgcagctcctggactgcaacttctcagatgaaaatgtaagagccattgcagttcagaaactggagagcttggaggacgatgatgttctgcattaccttctacaattggtccaggtaggggatgttggtgttatcaatggaagccttctcaaaaggaattgatttgcatatgcacaggcactccattcrgttgtcatcaaatgccctttgttcagagcttcatcatcggcaaaagtagatatgatgaagctgcctcaaaaagtagtaaactgttccatgtacatttttactgtctcggagggtttgctgacaagggttttgcagacattagtacttcacgtttttaggagaattggccctgtgggaatactttgttctcatttattattttaatgatagattgcacttactgaatgctttcttgtgccaaggctccaagtgactgacatgctttcagtgtattatctcatttaactcttccaataacta

SEQ ID NO: 516 - DNA, 601 bp, Human
gtccaaactggaaaaccagaggaagaattataaatccttccaagaagcctccagttcctaaaatataaactagaatgtgaatttcttccgttccttaggaaaaaaggatacaccatttctattcataaagtgtatactctgagatatttaatattaagtctttcttcatgtttacatatgacatctatcctctaactttatatatgcttttataataatctgaacaatgtttgttagtgttgctgcttttaaaattatgaactatttcaaacttacagaaaagcacagagaacaatgaaayacctatgcactcacaagatttaattgtgttttttacattttatcagttcttcctcatcagtaatggagctgtactaagtcaatattctctaacatcagccaagtgatatgaaaattactaaacactaaaaatgaagatcaaattatacttaagaaaacataaaatcagggacttttggacagaaagctctgtacacaccacagtgtggcagagggtagtgattgctctgtgtggattgatctagagccactgtttacttgtagttaaggacctgtgagacagttcagtgacttgccagtg

SEQ ID NO: 517 - DNA, 601 bp, Human
agcagaagctttaaattttgattaagtcaaatttgcaactttttcttaaatggtttgtgcttttagtgtcttatctaagaaatctgtctaggactagcacagtgtctcacacctgtaattccagcactgtgggaagccaaggcgggaggatcacttgaggcaaggagtatgagaccagactgggcaacatggcgagactccatctctacaaaaaataaaaaaaaatagccgggcatggtggcacgtgccatagtccccactacttggaaggctgtggtgggaggatcacttgagctcaggrgtttgatactgcagtgagctgtgtttgtgccactgcattccaacctgggctacagagcgagaccctgtttcaaaagaaatgaaaaagaaatctatctaatccagtgcctcagcctggggtaatccctctgtctgccaagggacatttggcaatgtctgaagacattgttgatggttataactgggagaatgctattggcatctagtgggtagaggccagggatgctgccaaataccctgcagggtacaggatagtcccccagaaccaacactatccaccccaaaatggcaacagtgccaa

SEQ ID NO: 518 - DNA, 601 bp, Human
gaggtgaaggtcagagttcatttttaaatatgaatatccagatttttcagcaccatgtgttgaaaagactgttttgttttgttttgttttgttttgtttttcctggagaactaccttggcacctttgtcaagtatcaactgaccgtatatgtgtgggtctacacctagattctctgttctgttccactgatctaaatgtctgtccttacatcaataccacacattcttgattatgtttaaataacaaagcacttcatatacgtgtgcttatacaggcaacagtatacttccattaaccccygcatcctttgcattatttttattatgatttcaacttctatatatgttataaatggcacaataagttactatttttgccctaaacagttaaaaaatagacttaacagacttaatagatgaaataatttttaactattcacctacatatttaccatttttggtactctttattgccttatatcggtccacatttccttgagcttctaacatcttttctactgcaagtttgctgacaataaattctttcagcttttgtttatctgaaacactttttattctgctttcatttttgaaaaatatt

SEQ ID NO: 519 - DNA, 601 bp, Human
gtcttttcagtgtcttttgcaattcaattcttttgtcatgtataactgagacacacaaacacagcaggagaaatctaaaccgttgtgccttgaccttcctctgctggtcttgttccagggttatgaatatgaaaaaatagagatgagactttttgtgtcaactctgtccacaagagtgagttatctagtatgattagtatagctttctccagcatggcagcaggaagtaactacagggcctcttttatgcctgacatttcttcccttcctttttccctgcctccctttttcatcaattgcratgctcccacaactctttacagacttgtgaaatcttcaagaacacctttactctataactcaaaaattagttgaaaaataattacttctcaaggattattagaatcttaggtacttatttgtaaagatgtttagtgacttttttttcaagtatcttattaaaggaggcattctagaaaatatgaattagtttccaaatgccttaattttaaactttggcctgaacagttttttctttttcttaatggaagaagatatttaatatcttaaaaatattccaagttaggaagaacactacttg

SEQ ID NO: 520 - DNA, 601 bp, Human
ttgacacatccttcagatttcctgaaaataattgaaatatcttactttaaaaatattttcatctctgaaatatctcgttatttattggaggtattgtttaaccttagagagaccattaaattatttataaaatattttgtaattacctgtagctaatacattacatagaaaaaaactatgttaacagtgtctctgtttaagtataatcagatataaatatatacttaattttttaattttaaaaatagatacctgtttgactttgaggtagtccagaccttttctttttttttttttttttaatgtgtgcaaaagcccaaaggttcctaagcctggctgcaaagaagaatcaacagggacactttttaaaaacactcttatcagcctgggcaacacagtgagactccatctcttaaaaaaaaaattagctgggtatagtggtatgtgcctgtagtcccaggtactcaggaggctgaggcaggaggattgcctgagcccaggaggtggaaactgcagagagtcatgatcatgtccttacactccagcctggataacagagcgagaccctgtctcaaaaaaataaaataaaaaataaaaacac

SEQ ID NO: 521 - DNA, 601 bp, Human
acatccttcagatttcctgaaaataattgaaatatcttactttaaaaatattttcatctctgaaatatctcgttatttattggaggtattgtttaaccttagagagaccattaaattatttataaaatattttgtaattacctgtagctaatacattacatagaaaaaaactatgttaacagtgtctctgtttaagtataatcagatataaatatatacttaattttttaattttaaaaatagatacctgtttgactttgaggtagtccagaccttttctttttttttttttttttaatgkgtgcaaaagcccaaaggttcctaagcctggctgcaaagaagaatcaacagggacactttttaaaaacactcttatcagcctgggcaacacagtgagactccatctcttaaaaaaaaaattagctgggtatagtggtatgtgcctgtagtcccaggtactcaggaggctgaggcaggaggattgcctgagcccaggaggtggaaactgcagagagtcatgatcatgtccttacactccagcctggataacagagcgagaccctgtctcaaaaaaataaaataaaaaataaaaacacccttg

SEQ ID NO: 522 - DNA, 601 bp, Human
tatgttaacagtgtctctgtttaagtataatcagatataaatatatacttaattttttaattttaaaaatagatacctgtttgactttgaggtagtccagaccttttctttttttttttttttttaatgtgtgcaaaagcccaaaggttcctaagcctggctgcaaagaagaatcaacagggacactttttaaaaacactcttatcagcctgggcaacacagtgagactccatctcttaaaaaaaaaattagctgggtatagtggtatgtgcctgtagtcccaggtactcaggaggctgasgcaggaggattgcctgagcccaggaggtggaaactgcagagagtcatgatcatgtccttacactccagcctggataacagagcgagaccctgtctcaaaaaaataaaataaaaaataaaaacacccttgcctgcgctccattcccaggttataatttaattactgtgggatgagacccagacatcaatatttttctagattcttcaggtgattctaattcacagccagagttggaagccctgcgtggcctttgaaggtctagatgattcttcttccttgccctttgagcttttccccatc

SEQ ID NO: 523 - DNA, 601 bp, Human
cacttctggtcccagctcctaatgagaacgcggcgccttggcgtaagtgtccccaacacatgcaggagtgaaggagaggcaggagcatgtggtacttaaacagggacctaggtctgtgccgctgggtctgcatcctcatgagaccttggaccagtcttccaatctctctgtacctgtgatgcacctgcaaaatgggtatgatactggtacaggcttaatagggctgttctgaggaatacatgagttactaaaaaagacttggcacttggctcacggtaagcactttctacagagagtgtckaagcagcacagagcttgatgatccacttgactgacttgcagacggtgtgtagaaccctggcgggaactggcttatgttttggctgacgggatgactgatgatagtttaaagggaaagtcgtgcaaaaacaaccccggttacaggtgtctgtgcacctgccgcatgccaggccccaggctgtcttggggaaggtggaggcagggtctgggatgtcctcaccacctcccccatggggccaggccaccctcactcctggtacttctctttctggtctgcaaaatgggataatcactgagtccc

SEQ ID NO: 524 - DNA, 601 bp, Human
gggaccagggggggttgtgacaccctgaggccagctttgggtacgtactgggcccgagggcatgtcctatgacgtaggagatgacacagacgatgctgatgtatggcatccaggacactgtgtcctgtggagagaaagcagttggttcacctggagcagacaagctaggacgggaccccagggggcggccaacctgccctggtgggtggaggatggcacctggctcctcccccagcagtgccacctcgatgagccactgggaaatcagctgaacgtgggctatgagctggcaggacacacrgtccccagatgtctggccagttgtatttgctaaaacagctcattgtgaccccttttattttaaggcaggtggaggcgcaggatgggaggggcactggtcttcctggtgcagctccgggctcctgggaccctggcctgtcctcacctgcagtgccagagctgcagtgagcacgcagcaggctatgaggcagatggagaagcccagcagcagcagcagcctccgacccaggagctccaccacgaacacctacaggagggtggcagggctcaggcgggagaggcccagcttcacctccctcca

SEQ ID NO: 525 - DNA, 601 bp, Human
cttgggcatgtggggcagcacgtagggggcaaacggcagtgtacagggatggcaggccagcaaccacccgttaggcccactctgctgcctgcacagtctgtgtgttcccacccacaccaccattttaccatttcgctctcattatgtgccacccacccccttgcggtggacgggggaagagatgccatttccaggctgcattggccatccctggtatctctaaggagctccagcccggagcttctgggaccagggggggttgtgacaccctgaggccagctttgggtacgtactgggcccragggcatgtcctatgacgtaggagatgacacagacgatgctgatgtatggcatccaggacactgtgtcctgtggagagaaagcagttggttcacctggagcagacaagctaggacgggaccccagggggcggccaacctgccctggtgggtggaggatggcacctggctcctcccccagcagtgccacctcgatgagccactgggaaatcagctgaacgtgggctatgagctggcaggacacacggtccccagatgtctggccagttgtatttgctaaaacagctcattgtgaccccttt

SEQ ID NO: 526 - DNA, 601 bp, Human
tggccgagaggactgcaggaagatctcagtgatgagcagcgcgggtatgggacctgtagggggaggagagcagcctccctgaaggcagagcgggcccgagcatcccaggcctggccatgcagacccaccaggtagctggccccaggacagaggcgtctccaggactcttgggcatgtggggcagcacgtagggggcaaacggcagtgtacagggatggcaggccagcaaccacccgttaggcccactctgctgcctgcacagtctgtgtgttcccacccacaccaccattttaccatttcrctctcattatgtgccacccacccccttgcggtggacgggggaagagatgccatttccaggctgcattggccatccctggtatctctaaggagctccagcccggagcttctgggaccagggggggttgtgacaccctgaggccagctttgggtacgtactgggcccgagggcatgtcctatgacgtaggagatgacacagacgatgctgatgtatggcatccaggacactgtgtcctgtggagagaaagcagttggttcacctggagcagacaagctaggacgggaccccagggggcggcc

SEQ ID NO: 527 - DNA, 601 bp, Human
atcaagcccacggtgaagttggagagccagtgcacactgccccccaccatgaaggcagatggccgagaggactgcaggaagatctcagtgatgagcagcgcgggtatgggacctgtagggggaggagagcagcctccctgaaggcagagcgggcccgagcatcccaggcctggccatgcagacccaccaggtagctggccccaggacagaggcgtctccaggactcttgggcatgtggggcagcacgtagggggcaaacggcagtgtacagggatggcaggccagcaaccacccgttaggyccactctgctgcctgcacagtctgtgtgttcccacccacaccaccattttaccatttcgctctcattatgtgccacccacccccttgcggtggacgggggaagagatgccatttccaggctgcattggccatccctggtatctctaaggagctccagcccggagcttctgggaccagggggggttgtgacaccctgaggccagctttgggtacgtactgggcccgagggcatgtcctatgacgtaggagatgacacagacgatgctgatgtatggcatccaggacactgtgtcctgtgga

SEQ ID NO: 528 - DNA, 601 bp, Human
gagcgtgggccccgggccccactcacctggatgaacgggaagatcaagcccacggtgaagttggagagccagtgcacactgccccccaccatgaaggcagatggccgagaggactgcaggaagatctcagtgatgagcagcgcgggtatgggacctgtagggggaggagagcagcctccctgaaggcagagcgggcccgagcatcccaggcctggccatgcagacccaccaggtagctggccccaggacagaggcgtctccaggactcttgggcatgtggggcagcacgtagggggcaaayggcagtgtacagggatggcaggccagcaaccacccgttaggcccactctgctgcctgcacagtctgtgtgttcccacccacaccaccattttaccatttcgctctcattatgtgccacccacccccttgcggtggacgggggaagagatgccatttccaggctgcattggccatccctggtatctctaaggagctccagcccggagcttctgggaccagggggggttgtgacaccctgaggccagctttgggtacgtactgggcccgagggcatgtcctatgacgtaggagatgacacag

SEQ ID NO: 529 - DNA, 601 bp, Human
agcagggaacttcctcctgccttctacttgctcaaagaacagcagcacgtcttgttgaaaagtgatcaggttcattttattgactacacagaagcaattccattttccactaacaaaataatttaggatgaagaattctgactcagtgtctccacaggaacctgttcctcagctttctggatgtcattgtttctgacatcacaccttcctagacaggtatttctggaaaaggatctggtaagaggatgaatttggctctaaacaaatgcccatggccccggaagacctgtcggggccaccragttagtttctctggcaaaatttgattccttccatctcaccactatagtaactgttgttgttatgttaccaggagccacacaaaggttgacccatcaaggtggagccacgttaccaggagccacacgaaggctgaaccagcaaagtggaggaccagctgtttaattgactcgggtctggtgacaggccaacatggagagagacagcccagcttcaagaacagcaaggcagccctttgcacagttcccactggggtggggaggctggagatgaggactgcattccacatcagagttgtttt

SEQ ID NO: 530 - DNA, 601 bp, Human
tgcctgaatgagcagggaacttcctcctgccttctacttgctcaaagaacagcagcacgtcttgttgaaaagtgatcaggttcattttattgactacacagaagcaattccattttccactaacaaaataatttaggatgaagaattctgactcagtgtctccacaggaacctgttcctcagctttctggatgtcattgtttctgacatcacaccttcctagacaggtatttctggaaaaggatctggtaagaggatgaatttggctctaaacaaatgcccatggccccggaagacctgtyggggccaccaagttagtttctctggcaaaatttgattccttccatctcaccactatagtaactgttgttgttatgttaccaggagccacacaaaggttgacccatcaaggtggagccacgttaccaggagccacacgaaggctgaaccagcaaagtggaggaccagctgtttaattgactcgggtctggtgacaggccaacatggagagagacagcccagcttcaagaacagcaaggcagccctttgcacagttcccactggggtggggaggctggagatgaggactgcattccacatca

SEQ ID NO: 531 - DNA, 601 bp, Human
ggcttccggggcttggatcccgtggggcagggggattcgggggcctccgtcctcttcttccttagcctctgtgccggggcgggtcgctgcggaacgggggtcaagaggaggtcgaggaaggaaaggggggcgctgaggcccgcccatccccctctaatcccttgagccgccagaaataaccgcagattatccggggggaactgcagcccccttcttggagtgaggcaggatgaccccttccatgcatcgtggccatatccaatgctccaaagtccctattccttccctggaaaccccaagyccccaaacagccctttctccccccagatctccagacatgcaacccccagaccctgctaagggggacctgtcccacccctagaccccctaccctgcgtgggtttacgcacagcggggacatctttctgcttcctttccaagtggggtggcatacctgtttggggcgccgcggggcctccgggctcaggctttcttcttcatgcccactgagggtagcaaagggatcagcctgtctcccttccccttccctccccatcccacccactccccatccctccatctaggccccccagggttcagg

SEQ ID NO: 532 - DNA, 601 bp, Human
aacctttttgccttttcctttggctttgcccttttgattgctgttctttatcaccgtagctgcctcctcctcctcttcttcctccttcctcgcgcctttgggagtgcctgagcgtggagggggaaacaaggctgtgaactcctcaccctggtttgcaaagtgcttccaatacccatgtctcacttggatgctccccacaaccacaagagagtcgaccccatgttattattagagcccaaaaaggctaagacacctgcctgagaccgcatagctatcaaagcgggggtcaagatgccctgcmcgttgtctgactctagacccggcaaactccttacctagcactgtcttgtatgctgtaaggaccctctagctccccgcccccaggaccacctcaagatgtcaccacaccagaagcccttgccatccacctttcttcttcagggctttcttgtcaggactgccttccccaaccagaaacatggctgctgggctcttcctcgcactggctgggctccctgaggggtccttgtcggcctccccagaccctgcatgtgtggatgtgaaagcgtcacaacccccaccgcaactggagtcccctgtt

SEQ ID NO: 533 - DNA, 601 bp, Human
ctccagaggggaggcctcagagagcccagatgacataaggcccttgcatggccagtcctagcctggtgaccccacaaacgcctcctctgtttgcacaaatctggtttcctttgtccttatatcctgtcacaagagggggagccaaggttctaacctcaagtggctccaagcccccaccctctaggctcccaagtccaggcccctgcctctgctccctgaagggacctcagccccctgcccctctgggccccaacctttttgccttttcctttggctttgcccttttgattgctgttctttrtcaccgtagctgcctcctcctcctcttcttcctccttcctcgcgcctttgggagtgcctgagcgtggagggggaaacaaggctgtgaactcctcaccctggtttgcaaagtgcttccaatacccatgtctcacttggatgctccccacaaccacaagagagtcgaccccatgttattattagagcccaaaaaggctaagacacctgcctgagaccgcatagctatcaaagcgggggtcaagatgccctgcacgttgtctgactctagacccggcaaactccttacctagcactgtcttgt

SEQ ID NO: 534 - DNA, 601 bp, Human
ctaaaatccaggccctgtcctcgtggtgatcttcccactgggagaaacctgttccttgaagacttttgttactttctgtcagttggacctccctctcctgcttactccagcttttgtgtgttggtgtctgagtcctgtttgggagcaggggcaatattcaaaatatttaacaacctgttcgccatggagatgcatactggtaagcttggaggagaaacagggaggctcctgatgggcagtattaaccctttcgttgctggagtgtttagttgctgggaggttgggaggtcctgggtaaggwgagtgaaagcgcctggggagctcagggctgtagggtggaaacattttaacaaccggtgcagctgactgtcagtcagtactcatctgcctctctgcctgtgtgctcctcctccctggcacagaaaacatggtgggggcgtggggacatctctggctgtctgatggttatgctccagaggggaggcctcagagagcccagatgacataaggcccttgcatggccagtcctagcctggtgaccccacaaacgcctcctctgtttgcacaaatctggtttcctttgtccttatatcctgtcaca

SEQ ID NO: 535 - DNA, 601 bp, Human
ccctctgggagacagtaaactggcctttcagtttgtacatcagcatctggtgatcttggttaatgtgaatcagtccccctagacctgaccactcctgcacaaactaataaacctacaaagctaaaatccaggccctgtcctcgtggtgatcttcccactgggagaaacctgttccttgaagacttttgttactttctgtcagttggacctccctctcctgcttactccagcttttgtgtgttggtgtctgagtcctgtttgggagcaggggcaatattcaaaatatttaacaacctgttcrccatggagatgcatactggtaagcttggaggagaaacagggaggctcctgatgggcagtattaaccctttcgttgctggagtgtttagttgctgggaggttgggaggtcctgggtaaggtgagtgaaagcgcctggggagctcagggctgtagggtggaaacattttaacaaccggtgcagctgactgtcagtcagtactcatctgcctctctgcctgtgtgctcctcctccctggcacagaaaacatggtgggggcgtggggacatctctggctgtctgatggttatgctccagagggg

SEQ ID NO: 536 - DNA, 601 bp, Human
gaagtgatcatgggccactccaaggttaggtcataaaagatattgtggcttctatatggctctctgtctcttggactttgggagaagttggctgccatgccataagaacactcaagcaaaaaaaaaaaaaaaaaagaacactcaagcagcctccaggagaggtccctgtaggaaggaactgagatctccagctaacacctaccacagggaactattttagaagtggatccttcatttccagtgaagccttcagagtgaccgaagccccagctgacattttgactgcagcttcctccgagamcctgagccagaactactctgctaagccactcctagatttctggctctcagaaattgaataagaaagtaaatgttgttttaagatgctcagtttggggtgatttgttacatagcaatgcatagttaacacatgaatgaatatgtaagctcactttgctcattgagaaactcctaagaacaatttggtgacataaagccctagggtggcctggtgaccccacaacagccccttctgttctcacaaacctggtgccctttgtcctcatgttctatccctcacaggaagggagccaagagtcta

SEQ ID NO: 537 - DNA, 601 bp, Human
ctactcttattgttagcgtatagtaaataatgaataccatagtcaagatgatattcattatcataagatggcacccagtgatccttgtctcctggtatttgtgcctttgtgtagtctcctcccactgcataccagggttggtccctgtgaccagtagaatatggcagaagtgatcatgggccactccaaggttaggtcataaaagatattgtggcttctatatggctctctgtctcttggactttgggagaagttggctgccatgccataagaacactcaagcaaaaaaaaaaaaaaaaaagaacactcaagcagcctccaggagaggtccctgtaggaaggaactgagatctccagctaacacctaccacagggaactattttagaagtggatccttcatttccagtgaagccttcagagtgaccgaagccccagctgacattttgactgcagcttcctccgagaccctgagccagaactactctgctaagccactcctagatttctggctctcagaaattgaataagaaagtaaatgttgttttaagatgctcagtttggggtgatttgttacatagcaatgcatagttaacacatgaa

SEQ ID NO: 538 - DNA, 601 bp, Human
gatccacccgccttggcctcccaaaatgctgggattacaggcattagccactgtgcccagcctaaatacatacatttaagaaataaggcctgactcaggcatccccttccttcagctctcagatttgtggtgaggattagatgagatgtatgggaagacagcacaggatagtgctgaatatatgttcattcacttgatcagtaaatacttgttgagtagctaatatgtgttcagtgctaggaattcagccctaaacaaggcaggcacagtgcctgccctcgtggaacttatgccctgctcyaagtgaggccctgggctggcagcagtgtgggcatcgcctgggtgctcattaaaaatgtagactcccgggcccaccccacacactcaaccattttaacaagctccccacatgatctatgtacatcaaagcgagaggccctaggctaggggacgtttccagggtgcccactgtggtgggtgctctaccaggcacagcaggacagagatgacgggctatggccttttgctgacccaagtccccccagccccaggaagcccagccccacctcagcttcccgatgaaattctcccctcctcggga

SEQ ID NO: 539 - DNA, 601 bp, Human
cgaaacagcaccaggcatttcttactgggcccaaacaagggcaggagatgctgcctctgggggatttgtgtgtttattccaggcataggaaggacaactgtggggcccacaggctgagtgaaccctcaagactgagcctcccatgactggtgccctgcagatcagcctgggccgtgactttccagcagggaaggatgtgtgatcagctgacggggtattatctttcattgtaaatgagtaaaatgacatcagtctcctgtgaggatggggcatgcgagtcacccagagtctcttaaatccyggactcactggacctgcagtgctaaagagcagagcacgggactgacacgtctctccagaacatctctccatcttaaactcacacacacacacacgcaaaacaacttttgctttttaaaatacaagtcatgccaagcacagtggctcacgcatataatcccaacactttgagaagccgagacgagaggatcacttcaggaatttaagaccagcctgggcaacaaagtgagaccctggctctacaaaaaactagccaggtatggtggcatgtgcctagggtctcagctacatgagaggctga

SEQ ID NO: 540 - DNA, 601 bp, Human
ggagcagggtctgtataatgtgcccttaagatctttctttcttgagtttccttgtcgcctgctcacgttcatggattagagtgagtccactcaagatcacctccaagaagccttcctgaccccccatctgatttagatgtctcagctctgagtttccatgacaccttgctcttaccattcctcccactgcactgtaattggcaaaagagagacccgaaacagcaccaggcatttcttactgggcccaaacaagggcaggagatgctgcctctgggggatttgtgtgtttattccaggcatrggaaggacaactgtggggcccacaggctgagtgaaccctcaagactgagcctcccatgactggtgccctgcagatcagcctgggccgtgactttccagcagggaaggatgtgtgatcagctgacggggtattatctttcattgtaaatgagtaaaatgacatcagtctcctgtgaggatggggcatgcgagtcacccagagtctcttaaatcctggactcactggacctgcagtgctaaagagcagagcacgggactgacacgtctctccagaacatctctccatcttaaactcacacac

SEQ ID NO: 541 - DNA, 601 bp, Human
ccacgaagtcccaccttagaccccagctccaccccttgactagcccctggttcccttcctcagcctcactgggcacctctcccttcaatgatccaggttcccagccccaacctcagcacctcccccaggatccatagggacaggaagttgctaaaaatacccccaaactcaggtggacgaggctccaccagaaacgtgatctggagagcagtcccacagccacaggacaggtggcactgggggcacatccctaggatgcagttggggctcgctcaatgttggtccaaccctgtgaacccasagacttatgggagatacccttccatccccaaacttcctcaccctagtgggaaggaagcctttccaaccaaggcttgtaacagggacaccttgtttccctgagtcttccagggtagtcctttgacctcacttgagagaagacacagagtaggcactcaaaaatgcttaatattccctgcccctaaaaggcaaccatcttgaagagattaagagcatggccactggagatccagactgtcagctctacctcctactagtgatgtgaccgtgggcaagttgcttaacctctctgtgccttagt

SEQ ID NO: 542 - DNA, 601 bp, Human
tacatgtttatggctcctggagccggtgcaattccaaaaaaccccagaaatcctcagggtggctcttcctccaaaagttggagctcctacttctctctaccaaacccttttcggagctcacctttgggacagaatgacaacagtgagtatgtgccaatgttacctggaaagttcctggggaggggcctagacaaagaagtctcctataactgggaccccaaagatgcagcttcaaagccttcaggtgagggatcattctcaaagcctggagatgggggatcaccttcaaagccttcagatsatgagcccccaaagaataaagctaagagacctaaccgactttcttttattacaaaaggatataaaatcaagccaaaaccacaaaagcccacacatgagcagagagaagctgacagctctagtgactacgtcaacatggacttcactaaaagagagagcaatacaccagctccctctactcaaggactaccagattcgtggggcataattgctgaacccagacagtcagccttttctaattatgtgaatgttgagtttggagtgccatttccaaatccagcaaacgacctctcagatcttt

SEQ ID NO: 543 - DNA, 601 bp, Human
agcagccgggaacgcccctgagcggctccccgccggggtgcagggctgcggagaagaagtcgggcggggtgcccgtggtgaccgcgtcgctgggggacacgttgaggtagtccccgttgggcagcagcttgccatctgcatgctccatggacagcttggaaccgcaccacatgcgcatgtacccactgtcctcgggggagctctcggcgggcgagctggccttgtagccgcccccgctcgccgggaatgtcctgcccgccgcagaggtgggtgctggccccgcaggccccgcagaaggcagggcggcggcggcggcggcggcggccctgggctgcaagatctgcttgggggcggacacgctggcggggctcatgggcatgtagtcgtcgctcctgcagctgccgctcccactgcccgcgagggccgcgccgggcgtcatgggcatgtagccgtcgtctgcccccaggttgctgctggagctcctgtgggagccgatctcgatgtctccgtagtcctctgggtaggggtggtaggccaccttgggagaggacgcggggcaggacgggcagaggcggcccgcgctgcccgagaaggtggcccg

SEQ ID NO: 544 - DNA, 601 bp, Human
gtactggtcgctgtccccgccacaggtgtagggggccttgtaggagcggggcaaggagctgtagcagcagccgggaacgcccctgagcggctccccgccggggtgcagggctgcggagaagaagtcgggcggggtgcccgtggtgaccgcgtcgctgggggacacgttgaggtagtccccgttgggcagcagcttgccatctgcatgctccatggacagcttggaaccgcaccacatgcgcatgtacccactgtcctcgggggagctctcggcgggcgagctggccttgtagccgcccccrctcgccgggaatgtcctgcccgccgcagaggtgggtgctggccccgcaggccccgcagaaggcacggcggcggcggcggcggcggcggccctgggctgcaagatctgcttgggggcggacacgctggcggggctcatgggcatgtagtcgtcgctcctgcagctgccgctcccactgcccgcgagggccgcgccgggcgtcatgggcatgtagccgtcgtctgcccccaggttgctgctggagctcctgtgggagccgatctcgatgtctccgtagtcctctgggtaggggtggtaggcc

SEQ ID NO: 545 - DNA, 601 bp, Human
ggccccgggctcgccaaagtcgatgttgatgtactcgccggggctcttgggctccggtggcagtgggtactcgtgcatgctgggcaggctgggcagcccctccagggacaggcgcgtgggcctcaccgcccggccgcgctggcccaagaagccctccgggcggccgccgctaggccgcacgggcgaaggcactacagggtgagggggctgcgtggggccggccccgaaggcgctggccgcctggctgggccctggcgtggcctgaggctccagacgctcctcctccaggatgcgccccacrggggagctcatgagcacgtactggtcgctgtccccgccacaggtgtagggggccttgtaggagcggggcaaggagctgtagcagcagccgggaacgcccctgagcggctccccgccggggtgcagggctgcggagaagaagtcgggcggggtgcccgtggtgaccgcgtcgctgggggacacgttgaggtagtccccgttgggcagcagcttgccatctgcatgctccatggacagcttggaaccgcaccacatgcgcatgtacccactgtcctcgggggagctctcggcgggcgagctg

SEQ ID NO: 546 - DNA, 601 bp, Human
gtcgtggtggaggagaaggtctcggaactgtggcggcggcggcccccctgcgggtctgcgcggatgaccttggcgccgcggtgggggtccgggggctggctggcctgcaggaaggcctcgactcccgacacctgctccatgaggctcagcctcttcacgcccgacgtcgggctggccacgcgggcagcttctggcttcgggggggccgcgataggttgcggcggggtggcggccacaccaaaagccatctcggtgtagtcaccattgtccccggtgtccgaggacaacgatgaggcggcgyccgggccctgggcggtggcaacggccgaggcggggggcaggcggtacagctcccccggggccggcggcggtggcggcggctgcagagacgacgacggggacgcggacggacgcgggggcaacggcggatacggggaggaggcctcgggggacaggaggccgtccaaggagcccacggggtggccgctcggggcgcccggcttaggagacttgggggagctgaagtcgaggttcatgtagtcggagagcggagaccgctgccggctgtcgctgctggtgcccggggtgcctgagcccagcg

SEQ ID NO: 547 - DNA, 601 bp, Human
ggtacaagtaagaacgtgtgggtatgtacacaggatgtattcacataggtgttcttttttatgaaacattttagacttacagaaggtatataaaaaatccacctacctaccacccagcttagaccaatatagttgaagcctttaatggacacctcctctgtcactttttctccctcgtctcctagaggtaactaccattgccatttcatgttatcttttccttgtgtttctttattattttaccacatgttcatatacctctaaacattttaaaatctgcatttaaaaggttttttaatawgagtatttttcttcatgtttattttttaagtgccattacatcctaggtctaaaaacaaaattatgaaagtgcagatgattttggtagtttgttgatatcaatgagtgaaatttaattttcagtcctaaaatttagaatgtatttctcatgccatattttttgtcattaaatttaaatgttttgtcagaagcttatttaactatattatatttgtcacgcatttccagtaggctgttttcttgggtttttttttttgattaatacctagtcaacatcataacacgatttaagtatacatat

SEQ ID NO: 548 - DNA, 601 bp, Human
catgttcatatacctctaaacattttaaaatctgcatttaaaaggttttttaatatgagtatttttcttcatgtttattttttaagtgccattacatcctaggtctaaaaacaaaattatgaaagtgcagatgattttggtagtttgttgatatcaatgagtgaaatttaattttcagtcctaaaatttagaatgtatttctcatgccatattttttgtcattaaatttaaatgttttgtcagaagcttatttaactatattatatttgtcacgcatttccagtaggctgttttcttgggtttttttttttgattaatacctagtcaacatcataacacgatttaagtatacatattgcatcttgattcatctgtatgactgtccttgaatgcagattacatttagattgaatataggctattaacaaaaatggttaaatttaacataaaaataactatgttggttctgtcaataaaaggtacgtgtagaattatgttcttttaagaacagattggacatttgggaagaggttaactttctcaaagtcttgccatgtgatttcctagggtgcaatacaagttaatatataactccccaaat

SEQ ID NO: 549 - DNA, 601 bp, Human
cacagagtggtgcaacaatcactacagtcaaatttgaccattttcatcaccttataaagaaacctttagtagttactcccccatttcctcccaactccctccccaacaatatgaggcaactatgaatctattttctgtttctacagatttgccttttcaggacattttgtataaacaaaatcatacgatatatgatctcttgtgacttacttcttttgtttagaatagaataggctgccaaggtttatccctgttatagcatttatcagtacttcattcttatttactgacaaataataawattccactgtgcagtcatgccacattttgtttttctattatcagttgataggcatttggatatatctccacttttgggctatgatgaataatgctgctgtgtacatttatgaagaagtttttatgtgtacatatgtttcatttctctgcatacagacctagcatggcatcgctgggttatactataactttatgtttagctttttaagacagtgctaaactgtcttccaaagcagctgcatcatttaacattttaaccagcagtgtatgagggctccaatttttccacatcctcaccaac

SEQ ID NO: 550 - DNA, 601 bp, Human
taaacaaaatcatacgatatatgatctcttgtgacttacttcttttgtttagaatagaataggctgccaaggtttatccctgttatagcatttatcagtacttcattcttatttactgacaaataataatattccactgtgcagtcatgccacattttgtttttctattatcagttgataggcatttggatatatctccacttttgggctatgatgaataatgctgctgtgtacatttatgaagaagtttttatgtgtacatatgtttcatttctctgcatacagacctagcatggcatcrctgggttatactataactttatgtttagctttttaagacagtgctaaactgtcttccaaagcagctgcatcatttaacattttaaccagcagtgtatgagggctccaatttttccacatcctcaccaacatttgttttttctttattttgtttacctgtgtgtaaagtcttaccccatgatgccaactgtactctcaatgttgtcctcaatgacctcttaatagataatttgccatttagggtaaacttcagtgggctgtggggtacacttaaaattaatagaagaatatttgaaaagag

SEQ ID NO: 551 - DNA, 601 bp, Human
tgacctcttaatagataatttgccatttagggtaaacttcagtgggctgtggggtacacttaaaattaatagaagaatatttgaaaagagaaaagcatgaaaatacagggccatgaagttctgacaatagcctccttcatactgaaatcatttagcaataagcaacaaaaacttgaatgccaaagatattcaaaactaggtttggctttcatgactcatgataaaagtggttatgcacagcagccaaaatgaagatagtcattcagttttattttactataaagactaagtgagaggtgargctcgcgttttcacgcacatgctgattgagagactggaaaggtcatagctgattgttcctataccttctttttatcgaaccaaatttgacaatacatatttaaaatccatttgtctgtttatttgcttcttttgtaaattatagttttctgcaaactgatatatctttatgttataggttcagtcggcaatgtgttgttgacaaggacaaaaggaatcaatgtagatattgtcgattaagaaagtgttttagagcgggaatgaaaaaagaaggtaataataatgatgatgataattaaca

SEQ ID NO: 552 - DNA, 601 bp, Human
gaaaagagaaaagcatgaaaatacagggccatgaagttctgacaatagcctccttcatactgaaatcatttagcaataagcaacaaaaacttgaatgccaaagatattcaaaactaggtttggctttcatgactcatgataaaagtggttatgcacagcagccaaaatgaagatagtcattcagttttattttactataaagactaagtgagaggtgaggctcgcgttttcacgcacatgctgattgagagactggaaaggtcatagctgattgttcctataccttctttttatcgaaccraatttgacaatacatatttaaaatccatttgtctgtttatttgcttcttttgtaaattatagttttctgcaaactgatatatctttatgttataggttcagtcggcaatgtgttgttgacaaggacaaaaggaatcaatgtagatattgtcgattaagaaagtgttttagagcgggaatgaaaaaagaaggtaataataatgatgatgataattaacattattgatgaaaagtgataaacatacacacacattctcattgattagtataactttttacatgagttctaattttcctcaat

SEQ ID NO: 553 - DNA, 601 bp, Human
acctgattatggatatcattctctccaccattacattgtccaaggcaacaaaattattgactaaatggtataccaatattctgttagtgggttgaaattacagatttttttttttttttttgagatggagtctcgctctgtcaaccaggctggagtgcagagtggcatgatcatggctcactgcaacctaccaggttcaagcaattctcctgcctcagcctctccagtagctgggactacaggtgcgcatcatcacgcctggctaatttttgtatttttagtagaaccagagtttcaccaygttagccaggctggtcttgaactcctgacctcaagtaatccacccctctcagcctcccaaagggctgggattacaggcttgagccaccacacctgacacaaatgtattttttgttgttgttgttctcaataacaactgaatatcttttttcttttgatgaacattgaatgaacatctacttttcatgcattcatttatttactaaatacttgttgaacactgcaattttccaaacactgttctaggtgctaaagcttcaatagtgaacatagcagacaaaataatcttccctttcaggaa

SEQ ID NO: 554 - DNA, 601 bp, Human
tttggtcatgcctatcatatacaaagagatgtttttcacaactatttcacaaactaaaataatcaaatgaaaccactatactaaagaagtgtaaaatatatgaagcccatctttaacatagttagatttttctttgccattcaatattttaaggatacagaaataccattagttttgctcaggttggtagtgtcgaagacaacaaaaaataaagttcacaaaattaaaggagaagcactttctcatttaaaaagtgatttatttctaatttcataggaagctctatttggcagtttatggractaattacacacttggtcaattgccttcctccatttttacttgaactccatgtttatccccacaaaagtgtaagcaaataacaatcctatgtttcctttatgagttttacaatttgtgaaatacaattatgttttaaaataggtaaattttatcttttgttcataaaagaatgtgttattttcttaaataaactggaaagtaatttcaagttttaaagttgatatatttctcttttttacactaacagcatagtagcaagattaattagatggaaacaaatagaagcatagttttatgt

SEQ ID NO: 555 - DNA, 601 bp, Human
tggaaacaaatagaagcatagttttatgtcaaaaatgatagcactgagattataaatgtttacaatatcttttagcatttttctaaagaataatcatgtaagtgaaattcataaacgcttagctaacatcttaattttttatctctgcatatgcatttccaaataagtcagtttaggttaaaaatcaataacaatttctgtaaaacaaaaagagcaagctaccagtaagtatgattttaaaataaaatattactgattcactccaacttacaaaaactcactctttctttttttttttttycacaaagaagtttctcagaatgcttctgggtagttgtttttttttaattattattattattatactttaagttttagggtacatgtgcacaacatgcaggctagttacatatgtatacatgtgccatgctggtgtgctgcacccattaactcatcatttagcattaggtatatctcctaatgctatccctcccctctccccctaccccacaacagtccccagagtgtgatgttccccttcctatgtccatgtgttctcattgttcaattcccatctatgagtgagaacatgtgatgtttg

SEQ ID NO: 556 - DNA, 601 bp, Human
tggttttttgtccttgtgatagtttactgagaatgatgatttccaatttcatccatgtccctacaaaggacatgaactcatcattttttatggctgcatagtattccatggtgtatatgtgccacatttactatgacaaacccacagacaactcactctttcttaaaagcaaaaagtcctgtaattcctcctttaacttaatggagtggatatttaatagtaagttttaggtctctagaaattggtggatttctttaacaaaagcatacttgcagaaaaaaaatgatattttaatgccttrttgctccagcagaacaaattacagccttaaccgaaataatttaggggctacattccttgtttcccttctctttggttaatgaaagataatttcacctctaaagttttgaaattcaactttgatatctattttattctctctctctctctttttttttaattttattttgagatggagtctcactctgtcactcaggctggtgtgcagtggtgcgatcttggctcactctgaccttcgcctcttgggttcaagtgattctcctgcctcagcctcccaagtagctgggactacaagcgtgtg

SEQ ID NO: 557 - DNA, 601 bp, Human
ggtaaactgtcccatggacagtgttttataagagatcataatattgcaatcctaaaatcatcataactaagtttactttccatttttgctcgtgttttatagagaaaagaaaatggaagtttcaaaatctatgactcatattttctgatagtgaatacactcttatctttgacctggtcaatcttataggcaatgctcttcctctagttatcttatagttttattaactttgagagaatagaaaaccaccctattaaaaatacagcgtggcggaactggctgacccaacactttctaacaygcatgctgtcatgaagtctcaaacagcattgttttatgagctctagtgacaaacctgactattgctatttttgaaagtagtggagaatgaaaatatctttcttccaaggtcttttagaaagactttttctcactttttttacttaaaaaaaaaactccttaaaatctatattctaacatacactaaagagaagtgctcaataaatactgtgttttttccccctagctgtacaaaatgaacgtgacagaataagcaccagaagaagcacatttgatggcagcaacatcccctccattaaca

SEQ ID NO: 558 - DNA, 601 bp, Human
agttttattaactttgagagaatagaaaaccaccctattaaaaatacagcgtggcggaactggctgacccaacactttctaacacgcatgctgtcatgaagtctcaaacagcattgttttatgagctctagtgacaaacctgactattgctatttttgaaagtagtggagaatgaaaatatctttcttccaaggtcttttagaaagactttttctcactttttttacttaaaaaaaaaactccttaaaatctatattctaacatacactaaagagaagtgctcaataaatactgtgttttytccccctagctgtacaaaatgaacgtgacagaataagcaccagaagaagcacatttgatggcagcaacatcccctccattaacacactggcacaagctgaagttcggtctcgccaggtacctgtggcacggcagcatcaaaccctatttaataaaatcaaatgtccatgtaggcatcatgctaaaataatctaagttttttcaaaggtgctcattactaaaataagttacatctacacacaattaagagttttactttgaaagtttgagtgggactgctgacttaattttgactgttctt

SEQ ID NO: 559 - DNA, 601 bp, Human
gaatgttggccatctattattttaaatgataatataatgcttttcttaatactagatctcagtctcaagccctgggtcaagcactgacataaacgttaagaaaattgcaagtattggtgatgtctgtgaatctatgaaacagcagctcttagtcttggtggaatgggctaaatatattcctgccttctgtgaattaccattggatgatcaggtacacatttaaaactttataaatgctttaaaaatgcttcttgaactttgctaagtttatgttctttccatattatttgtaatgcatatkctatattactgtatttggcaaaagataaattaggaggaaggattgggtttccttacccattcaccttgttctatcaagaggcacaactgtttgacttctattttaggggtgtagcaaatttattgattggacaagaactgaacaaaacactcctctgcccttttggaattttaaaagggtcatgtgagggagaaaggtagatagcatgtaactatcattgtgagacaaagtattagaagagtgaatgtctgtgaagcaaatggtggatgttgtgtattggcgtttactgaagctgctata

SEQ ID NO: 560 - DNA, 601 bp, Human
aatgcatatgctatattactgtatttggcaaaagataaattaggaggaaggattgggtttccttacccattcaccttgttctatcaagaggcacaactgtttgacttctattttaggggtgtagcaaatttattgattggacaagaactgaacaaaacactcctctgcccttttggaattttaaaagggtcatgtgagggagaaaggtagatagcatgtaactatcattgtgagacaaagtattagaagagtgaatgtctgtgaagcaaatggtggatgttgtgtattggcgtttactgargctgctatataaaactcctcagaaataccaggtcactcctagacagaaaccacacaggttgtggtgttgtcttggtgggtacttcatgcaattaacgtaaagttttacctttcatgctgtcaattttattctagaatttattgtataaaagttacatgtctggcaaaaagaaaaacatctgtagaaacatgatcagaaatttatagagaaataaaatttacacaacaaaagatagagtgatcttttactaatacttctattttcatattttgtcatatgcccattaggatattttaataa

SEQ ID NO: 561 - DNA, 601 bp, Human
tgtttgacttctattttaggggtgtagcaaatttattgattggacaagaactgaacaaaacactcctctgcccttttggaattttaaaagggtcatgtgagggagaaaggtagatagcatgtaactatcattgtgagacaaagtattagaagagtgaatgtctgtgaagcaaatggtggatgttgtgtattggcgtttactgaagctgctatataaaactcctcagaaataccaggtcactcctagacagaaaccacacaggttgtggtgttgtcttggtgggtacttcatgcaattaacrtaaagttttacctttcatgctgtcaattttattctagaatttattgtataaaagttacatgtctggcaaaaagaaaaacatctgtagaaacatgatcagaaatttatagagaaataaaatttacacaacaaaagatagagtgatcttttactaatacttctattttcatattttgtcatatgcccattaggatattttaataaatacttaggaacttgaatttcctaattgtactataaagataagtattttggtttcagattcattttgaaccgttcttactaagtagggtataatttt

SEQ ID NO: 562 - DNA, 601 bp, Human
gaaaacaaatgagtaagttcaaacgtactggttaacttacacaaggttaaacaggtagtaagtggccgtgctgggatttgaactctggtctgattctgtttcccttgcaaacagttaacttgtctgctttttttttttttctttctgctgccattgtattgatttgctagatagttttaaaatttttgaaaagtaagttctattgacatgctatgatagaaaactggaaggcttaatgatggcatgtatctatgaatactatagtttgttaaacaaaaagtcccaggcttaaagaacactstaagttaacaagactcatgtcatcttttaatcattatatattataattaattgttaaactgagaatttttcattaaggtggcactgttgagagctcacgcaggggagcacttactgcttggagctacaaagagatccatgatatataaagatattttgcttttgggtaagttttttttttaatttaagaagaaattatgcatattttattcttgcaatattatacagggtctgttctgtatgtaccaagtatttacagacactggcaaatggtgctgtcacttcacaggtttaatttaat

SEQ ID NO: 563 - DNA, 601 bp, Human
tctgctgccattgtattgatttgctagatagttttaaaatttttgaaaagtaagttctattgacatgctatgatagaaaactggaaggcttaatgatggcatgtatctatgaatactatagtttgttaaacaaaaagtcccaggcttaaagaacactgtaagttaacaagactcatgtcatcttttaatcattatatattataattaattgttaaactgagaatttttcattaaggtggcactgttgagagctcacgcaggggagcacttactgcttggagctacaaagagatccatgatrtataaagatattttgcttttgggtaagttttttttttaatttaagaagaaattatgcatattttattcttgcaatattatacagggtctgttctgtatgtaccaagtatttacagacactggcaaatggtgctgtcacttcacaggtttaatttaattgtgtcctcacttggccttatttttccttgccttgactgtatgtaagttcagagtccatgagacaatcagggagcattaagatttaaaaataaaaaagagatgttgctcaataaacataatattgaggtatgttcaaattata

SEQ ID NO: 564 - DNA, 601 bp, Human
tagttttaaaatttttgaaaagtaagttctattgacatgctatgatagaaaactggaaggcttaatgatggcatgtatctatgaatactatagtttgttaaacaaaaagtcccaggcttaaagaacactgtaagttaacaagactcatgtcatcttttaatcattatatattataattaattgttaaactgagaatttttcattaaggtggcactgttgagagctcacgcaggggagcacttactgcttggagctacaaagagatccatgatatataaagatattttgcttttgggtaagttttttttttaatttaagaagaaattatgcatattttattcttgcaatattatacagggtctgttctgtatgtaccaagtatttacagacactggcaaatggtgctgtcacttcacaggtttaatttaattgtgtcctcacttggccttatttttccttgccttgactgtatgtaagttcagagtccatgagacaatcagggagcattaagatttaaaaataaaaaagagatgttgctcaataaacataatattgaggtatgttcaaattatatcagaatgaataattagtaaattatatg

SEQ ID NO: 565 - DNA, 601 bp, Human
atgctacaaaatgatcaagtaaaaaagtattggtggtaatgactgaacaatttcgatagacaggaatgctagaagaggctaaggaaggataataggtgtggggtggtggggtagagaagacataaagaaaagacatttgtcttcattaattgctccaatcccgctaccttacttaacttaaacagttaggttttgagggttgagatccttctgacacttactagctctacctctctctggcatgtgtgaaaatatgactagattattttatttttgtgctagatgttttagccccaaatayaaataaattgaagacaatataacaatatttaatattattgcaggtttactatgtaaatgcactggtctaagtacattacatgtatatgtatatatattctctcatttaatccttgaaatagccctaagggattagtactactattttcagcccattttgcaggtgaagaaatggagacagagaaagtttaccaaaggtcacaaagctagaaaataatatagccaagattctaaaccacataatgtgattgtggagactatgccctgaaatgctattaaatacctctcttgaatttctagt

SEQ ID NO: 566 - DNA, 601 bp, Human
ttctaagttagaaagatctttagggaataggtggtccagctcgctacccaatctctgaactcccttaaagtcagccttataaagtggttatcccacctctatttaaagaagtcctggaagagaaaacatactatcagaggcaactcatgagaattcacatgctaatttaaaaaaaaaaatcaacctcctttacttaggtgtgttaaaactgtctcaatagtgtatgcctagaatgcctagagtatcaaagtgctgtttttaatccgctgtaaacaagaaagattctttagggtttgtattrtagtcattagtgaataaaacgctaatagatgtctgacacagagaaaaactaatcattatatttagattttgtcaaatatcagcatgttattagtctgcacttttgtgttatcaccagtgactgatcccgttaaaatgcatgtgatcacattattaatgttcttggtcctttaagcatgcttaagtttttctagcataactaacaacaccactgagagaggaagtacatcactattccttcaagggtagactattttaaacaccggtttgttaaattttaaacagtgctgacaatttgggg

SEQ ID NO: 567 - DNA, 601 bp, Human
acagtttgttaaactttttgggatggttaaaattgacaatctacttcaggaaatgctattaggtggtgagtacattgaataatttctactttattgattagaatcacactaaatataagtttgacctactgatttttttgtccatatttaattcatctactgaagttgctgtgatgctcctgaatttttttccttctgctatgacataatgaactcaaggttttacatttagaaaatttgcaagacccatcagagagacaaaaatacttgaacagattcaaacccccattcgttttttttgttgttgttgttttgttttttaagacagagtctcgctcagtcgccaggctggagcacagtggcacaatctcggctcactgcaacctccgactccctaattcaagtgattctcctgcttcagcctccagagtagctgggactacaggcacacaccaccacgcctggctaatttttgtatttttagtagagacggggtttcaccgtgttgattaggatggtcttgatttcctgaccttgtgatctgccagcctcggcctcccaaagtgctgggaatacaggcgtgagccactgcacccagcct

SEQ ID NO: 568 - DNA, 601 bp, Human
tgttaaactttttgggatggttaaaattgacaatctacttcaggaaatgctattaggtggtgagtacattgaataatttctactttattgattagaatcacactaaatataagtttgacctactgatttttttgtccatatttaattcatctactgaagttgctgtgatgctcctgaatttttttccttctgctatgacataatgaactcaaggttttacatttagaaaatttgcaagacccatcagagagacaaaaatacttgaacagattcaaacccccattcgtttttttttttgttkttgttttgttttttaagacagagtctcgctcagtcgccaggctggagcacagtggcacaatctcggctcactgcaacctccgactccctaattcaagtgattctcctgcttcagcctccagagtagctgggactacaggcacacaccaccacgcctggctaatttttgtatttttagtagagacggggtttcaccgtgttgattaggatggtcttgatttcctgaccttgtgatctgccagcctcggcctcccaaagtgctgggaatacaggcgtgagccactgcacccagcctgaaacc

SEQ ID NO: 569 - DNA, 601 bp, Human
taaactttttgggatggttaaaattgacaatctacttcaggaaatgctattaggtggtgagtacattgaataatttctactttattgattagaatcacactaaatataagtttgacctactgatttttttgtccatatttaattcatctactgaagttgctgtgatgctcctgaatttttttccttctgctatgacataatgaactcaaggttttacatttagaaaatttgcaagacccatcagagagacaaaaatacttgaacagattcaaacccccattcgtttttttttttgttgttgttttgttttttaagacagagtctcgctcagtcgccaggctggagcacagtggcacaatctcggctcactgcaacctccgactccctaattcaagtgattctcctgcttcagcctccagagtagctgggactacaggcacacaccaccacgcctggctaatttttgtatttttagtagagacggggtttcaccgtgttgattaggatggtcttgatttcctgaccttgtgatctgccagcctcggcctcccaaagtgctgggaatacaggcgtgagccactgcacccagcctgaaaccccc

SEQ ID NO: 570 - DNA, 601 bp, Human
agttttctggtgcataatttgttcctaatgatatctttctgaaatgaaagttgttcatgctattacagtgatcccaaatactataaacttgaggtaagtgattcttggaattgccttaacaacaggcagcgaacctaatgattccaggaaacggcacacaaggtccattattaatacacagcataatatgatgcaacattaatctagccaatgtacagtgaaagctgacattgttcttaatatgccagtggttctgtcaatttatttttgaattcccaaaaagcacttggcaaaaatagcratatttaagctgtcaatcaaaacatttgtttcaaggtaaacttgctgttcctgattaaatatcactaacacagcatctttttatcttttgtaggggcttccaatgatggcagtcatctccatcatccaatgcatccacatttgtctcaagacccattaactggacaaactatacttttaggtcccatgtcaacactggttcatgcagaccagatctgtaagtttatagactacttttcaaccaagatatttcttaattacccaagaaaaagtggaattgtgggaaagaatctattagtaa

SEQ ID NO: 571 - DNA, 601 bp, Human
gaatctattagtaaccagaaatggcaaaaacttggtgtaatttcccatctgagactcagcagtagaagactgttattcagcttgtcacttattctccctagacataagtttgcttcctaaaatgaaaatgaaagaaaaatctttctacttcataggtctggggagcacaaaagagtatacaagtagtccttgctttgcatggtagtgtgagaccataaaaacgacaatgcaagctgaaaccatgcaagggaatcttaataatcaatgggaaaattatttcttgcttggcaccttcaaaaaygtttgtcaaaatattaagaactctcttaatgtttatggagactaaagaaatataatctttatacttattttgtagaattcaatacaaaacatttcagttggtacactgtaattaaaacattaggaatattgacaatcgaagggttttatttctctataaaaaaaaattgtgaaatgcagtttgaccagttcttgtcaccttctgaaacttacattaggaagtgaggattttttctatgccctgatgagttttactcgttgggaagtttggatcagctttcaacattttatcccttgcatt

SEQ ID NO: 572 - DNA, 601 bp, Human
agtttgcttcctaaaatgaaaatgaaagaaaaatctttctacttcataggtctggggagcacaaaagagtatacaagtagtccttgctttgcatggtagtgtgagaccataaaaacgacaatgcaagctgaaaccatgcaagggaatcttaataatcaatgggaaaattatttcttgcttggcaccttcaaaaacgtttgtcaaaatattaagaactctcttaatgtttatggagactaaagaaatataatctttatacttattttgtagaattcaatacaaaacatttcagttggtacaytgtaattaaaacattaggaatattgacaatcgaagggttttatttctctataaaaaaaaattgtgaaatgcagtttgaccagttcttgtcaccttctgaaacttacattaggaagtgaggattttttctatgccctgatgagttttactcgttgggaagtttggatcagctttcaacattttatcccttgcattctcaatgtcatggcatgtttctgagaattcatttaatgtgaaattttcttgccggtttcacttattttgggacaccttctcccctttcgacacatccagctttctc

SEQ ID NO: 573 - DNA, 601 bp, Human
tcctttctgcacttccactgttgttggtcaattctaattcaattattcaattttgtaaaatgtgatgtgaatttaccactaggaaacaaggaggcaacacagccaccgtatgcagtttgttttccatgcctgaactgaatagaagatgctcaatgaccaatcatggacagactaaaagttgtgacatgatcagtcactgatcataaagcacatctgttatttaggtagctgtttgcagactgaagagttggcagtggggtctgtatttatgaaattgctcactcttaattgtgagttaccrtggtaactgaaacttgaaccatgttgttgccagactggtggtgtttaactaagccttggtaaccagaattcattcacatcagaattgtgcagtgagggctgcttatgaaaactccttggaatgcaaatgaccatataaatactatagagattgttagtagctaagttaatctattattgtagctttcatgctaattctattttttctaagctactctggtgatacaaatctctaattatttgattaaatatctagattaactgattaattgcttctgaatttactctaattaatcccaga

SEQ ID NO: 574 - DNA, 601 bp, Human
tgcacttccactgttgttggtcaattctaattcaattattcaattttgtaaaatgtgatgtgaatttaccactaggaaacaaggaggcaacacagccaccgtatgcagtttgttttccatgcctgaactgaatagaagatgctcaatgaccaatcatggacagactaaaagttgtgacatgatcagtcactgatcataaagcacatctgttatttaggtagctgtttgcagactgaagagttggcagtggggtctgtatttatgaaattgctcactcttaattgtgagttaccgtggtaaytgaaacttgaaccatgttgttgccagactggtggtgtttaactaagccttggtaaccagaattcattcacatcagaattgtgcagtgagggctgcttatgaaaactccttggaatgcaaatgaccatataaatactatagagattgttagtagctaagttaatctattattgtagctttcatgctaattctattttttctaagctactctggtgatacaaatctctaattatttgattaaatatctagattaactgattaattgcttctgaatttactctaattaatcccagatttacct

SEQ ID NO: 575 - DNA, 601 bp, Human
agtaccacctgacttctaggcattggtagggaacgtagaagccatgggactgcgtgctaccatgccatcttttagatacaagcacaggtagatctttgtgtaaatagtatctgaaaccaaaattatttgaatatatgagagagagaaagaaatgaaattgttaggaaaaaatataaattttagaaaaatatggcataatcttggatttccaatgtacttgaaagacattatttgggaccatccttgcagaatagatcttaccattttcatttaacagataatcaatagcagaaagagaggrgcaagcctaataccaaactagagcgtttatggagttgtgtctcttaaagatcagttattcataaactcacaaaataaaacacattaacaacacaataaacattgtaggaatcaactgacaagagagttggacagttctgctggtggttgaatactttttaagggctagtattatagtattttaaaaacatatttgctgaccctagtcttttaaaaatcacattgttactttcatttttattcttgttctttccacatactatttgtgggatttgtttgcaaaagaaaacttggctttact

SEQ ID NO: 576 - DNA, 601 bp, Human
aaagccagtatttttcagatgcttttgactacaacttagatttcagaacatttataaagtatcttaaccttaattttttatgtcatctaatatgtctgaattagtggaatccaaaccaaatatatttttattttatgtgaattttgattataaaaaatataaacattgttttctaatatttgagaaaactgtccttctgttaattcttttcactgcctttttttcctgctaggtttgttagagaatcaaatgcttataaatgctattaggaaaggcagaaaacaccttaaagtaactatgaaaaaaattttttaacatgacctctttctatttaatgttatttggaaagtaaggtgagagtactctctaacagtacgtcatgggccaataatgcattctacaaatcactattctgtgtaggatattttaaaaacatttccaaattacgctaatgtgtattggtgttatgtagggtttaatggggtgaggaagactgactgccaccattagactcaattctctgattctttttcagcaactcctgaaaccccactcccttccccaccacaaggctctgggcaagaacagtacaaaatagctg

SEQ ID NO: 577 - DNA, 601 bp, Human
gagaaggacaaaggaaggcaggactttggagtgtcctgggtgacctgatagctgggtcgacatccttttccttagaaggacaaggaatagagtacattgttgaacagtttggtggggtgtggacagggcgattctgaggtcctcagacatggaatcaaatcctggctctgccacttacacttagcaaccacatgactgtgaaacgagaaccatggtacctgcctcagagagttcagctaaagatcaaatgccatattgagtatcagacatgtatcatagcacctagccccaaatcagcccycagtaaatattagctattactactaacgaaggaaaccctgaaagtttggagcagaagtctggacccctcttgatgaatctatttttgtcccacctctctaccggtgacaagtgccagcattggtgttaatctccaggctgcagccttctggccactctgagaactgggacctagagggccagggcgcttactaccagagtaacctggccactgtgccaccctccccactggccaccagaccacgggccctccatccagaaggacagccccgagaggaagggagtcctcctgcctgcctcc

SEQ ID NO: 578 - DNA, 601 bp, Human
gtctggaaacttggcttattcaggtctgacccgtctctaatggtctgatgagattgttgcctgcactgagtgagtttatagagtcatgataaatcctcctaagaccatgcgtggggttcagtgtagatatgacttcagcaagaagttagtattcagcatccaaagggagaacctttggcgggaggaaggatgggaactgtcaatatcccccaagggacagaaagaaaaggaagaagtgggtttcagctatcataggagggatttcagttagactgtaagaagaacttcccagttttgagcrtttctaaatatctctgaagttccaggatatatcttcccatttagaaaggtcacttgagatctgggatagattcagagaagatggagaaggacaaaggaaggcaggactttggagtgtcctgggtgacctgatagctgggtcgacatccttttccttagaaggacaaggaatagagtacattgttgaacagtttggtggggtgtggacagggcgattctgaggtcctcagacatggaatcaaatcctggctctgccacttacacttagcaaccacatgactgtgaaacgagaaccatggta

SEQ ID NO: 579 - DNA, 601 bp, Human
gaatcacctggaggtaagctaaaagccccaacagcctgcttccccaggacctgcaagggtcactggcacttggccccaccccagatactgtgagacataaatcatttgaagccaatgggaaatcccatcttggaagcctagggctgagtgcccacaacaaagccatttctctcctgggggaactggatcgcacctgtgggggcttcctgtggctccttcctggctaatcagccccccccagcgcccagggccatggcctcctctgctatttggcttctagtgccctctcaggcccctgggyactcctgaggctggtgaaggcaggaacctggttttaccagttttaggagctcagaaggaaaggaaaggagaggcttccctgtcacagagaagtctggaaacttggcttattcaggtctgacccgtctctaatggtctgatgagattgttgcctgcactgagtgagtttatagagtcatgataaatcctcctaagaccatgcgtggggttcagtgtagatatgacttcagcaagaagttagtattcagcatccaaagggagaacctttggcgggaggaaggatgggaactgtcaatatccc

SEQ ID NO: 580 - DNA, 601 bp, Human
acaagactctccatgtattcacaggtaaagcaacagaatcacctggaggtaagctaaaagccccaacagcctgcttccccaggacctgcaagggtcactggcacttggccccaccccagatactgtgagacataaatcatttgaagccaatgggaaatcccatcttggaagcctagggctgagtgcccacaacaaagccatttctctcctgggggaactggatcgcacctgtgggggcttcctgtggctccttcctggctaatcagccccccccagcgcccagggccatggcctcctctgstatttggcttctagtgccctctcaggcccctgggcactcctgaggctggtgaaggcaggaacctggttttaccagttttaggagctcagaaggaaaggaaaggagaggcttccctgtcacagagaagtctggaaacttggcttattcaggtctgacccgtctctaatggtctgatgagattgttgcctgcactgagtgagtttatagagtcatgataaatcctcctaagaccatgcgtggggttcagtgtagatatgacttcagcaagaagttagtattcagcatccaaagggagaacct

SEQ ID NO: 581 - DNA, 601 bp, Human
gttttattcaactctttttattcaatccttttcctcctgttctgtgatcttgtgggaatgggagagcccatgcctttttctacctggcgtcagttgaacaagactctccatgtattcacaggtaaagcaacagaatcacctggaggtaagctaaaagccccaacagcctgcttccccaggacctgcaagggtcactggcacttggccccaccccagatactgtgagacataaatcatttgaagccaatgggaaatcccatcttggaagcctagggctgagtgcccacaacaaagccatttmtctcctgggggaactggatcgcacctgtgggggcttcctgtggctccttcctggctaatcagccccccccagcgcccagggccatggcctcctctgctatttggcttctagtgccctctcaggcccctgggcactcctgaggctggtgaaggcaggaacctggttttaccagttttaggagctcagaaggaaaggaaaggagaggcttccctgtcacagagaagtctggaaacttggcttattcaggtctgacccgtctctaatggtctgatgagattgttgcctgcactgagtgagttt

SEQ ID NO: 582 - DNA, 601 bp, Human
ctcacagggatacttggagtatttctgcccagaaacagttctgtggcagggctagctgggccgggcacaggcagggaaaggagaggagggccccagaaggcagctgcaggttgtcaggagaggcaggaggtttaccatattccggtgttttttttttttgtaaggaacattcccctacttcaagcaaagaaagaagaaagaaggcatcatggtggcctcagcgactgctttcttatttcagggcttgaagccacctgggacaaagcagaatgggcacattctgctggtggttgctttcctyctctcctctttctttaggcagcaactccttgtttttcccctggacattgactccaccccaatgcaagcaaagattccaccctcccctgctaggctcctgatcgctcccccaggagtgtgagtcttgacaaagacttcaagaaacagcccctcaatctatgccgcctggagccacagagatgcccagccatggtccccgcgtgatttcccatggttccgcaagctgtcctagagcctctggtaaatttatttgctgttgtttttatttgtttaaagtaaccagagtccatttctaccaaaa

SEQ ID NO: 583 - DNA, 601 bp, Human
tgaggccgtcaggtttatgatcatttgctacaacagtcataggtcccatgcggtgagcgagcagtacatgtgcatcatccatgcacctccttccacggcacttatctcacagggatacttggagtatttctgcccagaaacagttctgtggcagggctagctgggccgggcacaggcagggaaaggagaggagggccccagaaggcagctgcaggttgtcaggagaggcaggaggtttaccatattccggtgttttttttttttgtaaggaacattcccctacttcaagcaaagaaagaasaaagaaggcatcatggtggcctcagcgactgctttcttatttcagggcttgaagccacctgggacaaagcagaatgggcacattctgctggtggttgctttccttctctcctctttctttaggcagcaactccttgtttttcccctggacattgactccaccccaatgcaagcaaagattccaccctcccctgctaggctcctgatcgctcccccaggagtgtgagtcttgacaaagacttcaagaaacagcccctcaatctatgccgcctggagccacagagatgcccagccatggtcc

SEQ ID NO: 584 - DNA, 601 bp, Human
tctcttgaggtattcatcaggaggctggatgcccacctgacagggaggcttcagaggggagagaattatgcagctgagctgtaaacatctgcaattctctgattcctcctgggatcaaacttgcactggaacctttgctctgattctttgctatttcttctgagaagggcatcatgtgtctgttaccaccacgtcctagatcatgtgtctgttaccaccaggtcctagaatctcagaccagtggggctcagttcatcctaccttccctgcacttgaaccctagaacctaagaatgagcatygtcttgaccctgctgccttgaatgagggtcaaggagaggggtgagtagaaggccagggttccttacagatgccagacccttaggagagggttggggggtgggcaggccgggagagctcagtaccttttctggtagaggggcagcacagtcgtgaccaggatgtagtaggtgatgacggcacacaccaccatggttacacccaggcaaagggctcgtgtctctccccgcttctgggccatcaccagcttcttcaccatattcactgggggcagtgatcatttctaggtccacagaagcaaa

SEQ ID NO: 585 - DNA, 601 bp, Human
ggtctgagacttatcctaaggacaggctgggggaactgagtgtctttgttccaaatagaacacgaattaggaattcacagcttttccttaaaatctcaagtggttgatatgtcatggagcaagggcatggaccattctctgagattcctgagcagaacttcagggaagcagatgctggctcaatgcagacacatcagaaaacctcaaacatgaaatgtatgttcagtgaggcaaggagctccccgtctcttgaggtattcatcaggaggctggatgcccacctgacagggaggcttcagargggagagaattatgcagctgagctgtaaacatctgcaattctctgattcctcctgggatcaaacttgcactggaacctttgctctgattctttgctatttcttctgagaagggcatcatgtgtctgttaccaccacgtcctagatcatgtgtctgttaccaccaggtcctagaatctcagaccagtggggctcagttcatcctaccttccctgcacttgaaccctagaacctaagaatgagcatcgtcttgaccctgctgccttgaatgagggtcaaggagaggggtgagtagaaggcca

SEQ ID NO: 586 - DNA, 601 bp, Human
gcagattcaaacccaggtctgtgtgactccaacacagaagagctagggctggctcagtctcattccagctgtgagacctggtcaagtgggttgatctttctcagcctcggggacagggacagttaggaacaggctcacacacctgacagggataaagggatgtgtccccatccctccagttcagtacctgctggttctggtcccgagtgtcctccgtgtggtacagcacagcccacctgccggcagctgacacgttgacccacaggcatgggtactggggcaccttcttgcccttcagctyctcctggtccctgatgttggtctcaatcaggtggcacttggattcctgggtccacacgctgaggagaccacacacatgcacacatacacatctcagaactgggtgacacacagaacacccatttgaacccattatcccctgggagcctctagagggatccaggactgggatcctcatcttgtcttcagcatccagcaataaaggcacatgaccccacagtccccggacacagggaggaattgtagaagctggatggggtcttagacattatctatatgactggttctcaaccttggctac

SEQ ID NO: 587 - DNA, 601 bp, Human
aggctaagtggcctgcctatgtttacacagccagttagcggcagattcaaacccaggtctgtgtgactccaacacagaagagctagggctggctcagtctcattccagctgtgagacctggtcaagtgggttgatctttctcagcctcggggacagggacagttaggaacaggctcacacacctgacagggataaagggatgtgtccccatccctccagttcagtacctgctggttctggtcccgagtgtcctccgtgtggtacagcacagcccacctgccggcagctgacacgttgacccacaggcatgggtactggggcaccttcttgcccttcagctcctcctggtccctgatgttggtctcaatcaggtggcacttggattcctgggtccacacgctgaggagaccacacacatgcacacatacacatctcagaactgggtgacacacagaacacccatttgaacccattatcccctgggagcctctagagggatccaggactgggatcctcatcttgtcttcagcatccagcaataaaggcacatgaccccacagtccccggacacagggaggaattgtagaagctggatggggtc

SEQ ID NO: 588 - DNA, 601 bp, Human
ggagtgcaatggtgcaatctcaccaagagcctttctgatacccccatcattgtcagctggaaaacatccccctcctctaacccctgtaacttcctctgttcttctccccggtgccaattcttccctgctaggcactgttcatgcatgagctctctcctcttgagtcctacaggcttgacacaggaggtgctcaatggctgttgaataaataaatgagaggaggaaagaaggaaacaaggaaggaaggaaggaaggaaggaagggagggagagagggagggaaggagggaggggaaaaaaaagaaaagaaagaaggagggaagaaagggaaaaaagaaggaaagaaagaaggaaggaagagagacagaatatgggccaactgatcgctttaggaaaggatatggtggtgagttttgtgttttggagggggagggtgggatgttgggatgcaaggatggaaaaaccatctaaatgtttgtttatggaggttactccagccctgagtccctggtttcctggggagtcaccgggattccactttgaggatctggccctgggcctggtccctcatttgactgaggttgtagaatgaaagtactaac

SEQ ID NO: 589 - DNA, 601 bp, Human
gccaggctggagtgcaatggtgcaatctcaccaagagcctttctgatacccccatcattgtcagctggaaaacatccccctcctctaacccctgtaacttcctctgttcttctccccggtgccaattcttccctgctaggcactgttcatgcatgagctctctcctcttgagtcctacaggcttgacacaggaggtgctcaatggctgttgaataaataaatgagaggaggaaagaaggaaacaaggaaggaaggaaggaaggaaggaagggagggagagagggagggaaggagggaggggaaaaaaaagaaaagaaagaaggagggaagaaagggaaaaaagaaggaaagaaagaaggaaggaagagagacagaatatgggccaactgatcgctttaggaaaggatatggtggtgagttttgtgttttggagggggagggtgggatgttgggatgcaaggatggaaaaaccatctaaatgtttgtttatggaggttactccagccctgagtccctggtttcctggggagtcaccgggattccactttgaggatctggccctgggcctggtccctcatttgactgaggttgtagaatgaaa

SEQ ID NO: 590 - DNA, 601 bp, Human
aggccacatcttggtcgtgagtgcttgctgcggccttggctcctctgtctagtaactggacccacacacctgtaggctccatcttcccagcccaactctgaaactctgatcatgccctaaagattcccattgccaacagcaataatttccaaccttagaatcaccttgggagctccatgaatggatctctgaccagagattccaccttgatatgtctagtgttggaccctagttttgttttttaagactcttacagggttctaatgcatagccaaagttgacatatcttgagacatacacrctcacattttaattccatattgtggtgatcaaaggcctctgggaacagaccttagtctgccctgacagccttttccagctgcatacaccccatcatgggtcattttctgtagtcagccctctgatccctgtctccacctagcccttccctccgccatgcctcgtcctataggcatacccgcttcctatatcacctcattctctatgccttgcatcctgcgcctgcctgatgttaaaagcctaatccaagagcctttcttttttttttttttttttttgagatggagtttcactcttgttg

SEQ ID NO: 591 - DNA, 601 bp, Human
gtttcttgcattgggataaatcaagggctactgaatgccaacgcagaggcaggggtcatgggtaggagctgcctccagtgggccctgagacctctctccaccgggtggggccgagtcatactagcgatgacagaacacctgaccatcctgcactgcccagacccacttctcattgaccttcagcactctcaagatcccccagcctccacgccccatcccaggcaccctgccccttcccgtcccatcagccatcaagtccggactgtcagcatctcccctgctgcaggccacatcttggtcstgagtgcttgctgcggccttggctcctctgtctagtaactggacccacacacctgtaggctccatcttcccagcccaactctgaaactctgatcatgccctaaagattcccattgccaacagcaataatttccaaccttagaatcaccttgggagctccatgaatggatctctgaccagagattccaccttgatatgtctagtgttggaccctagttttgttttttaagactcttacagggttctaatgcatagccaaagttgacatatcttgagacatacacactcacattttaattcc

SEQ ID NO: 592 - DNA, 601 bp, Human
atcctgctgacagttcattcaggggatgctcctctgagctggcaatctcaggaccagggaggcagcctgaaaaccagcctgctctggcccatatcactcccggagaatgttaccagttattgaaaatttgtttcttgcattgggataaatcaagggctactgaatgccaacgcagaggcaggggtcatgggtaggagctgcctccagtgggccctgagacctctctccaccgggtggggccgagtcatactagcgatgacagaacacctgaccatcctgcactgcccagacccacttctcmttgaccttcagcactctcaagatcccccagcctccacgccccatcccaggcaccctgccccttcccgtcccatcagccatcaagtccggactgtcagcatctcccctgctgcaggccacatcttggtcgtgagtgcttgctgcggccttggctcctctgtctagtaactggacccacacacctgtaggctccatcttcccagcccaactctgaaactctgatcatgccctaaagattcccattgccaacagcaataatttccaaccttagaatcaccttgggagctccatgaatggatct

SEQ ID NO: 593 - DNA, 601 bp, Human
cagcatgtccttccttcacatcctgctgacagttcattcaggggatgctcctctgagctggcaatctcaggaccagggaggcagcctgaaaaccagcctgctctggcccatatcactcccggagaatgttaccagttattgaaaatttgtttcttgcattgggataaatcaagggctactgaatgccaacgcagaggcaggggtcatgggtaggagctgcctccagtgggccctgagacctctctccaccgggtggggccgagtcatactagcgatgacagaacacctgaccatcctgcaytgcccagacccacttctcattgaccttcagcactctcaagatcccccagcctccacgccccatcccaggcaccctgccccttcccgtcccatcagccatcaagtccggactgtcagcatctcccctgctgcaggccacatcttggtcgtgagtgcttgctgcggccttggctcctctgtctagtaactggacccacacacctgtaggctccatcttcccagcccaactctgaaactctgatcatgccctaaagattcccattgccaacagcaataatttccaaccttagaatcaccttgg

SEQ ID NO: 594 - DNA, 601 bp, Human
gagggaatttagaactcacctgctccaggctaagactcacaggaaaagctgagggcagactatggcccctaccttcagagttggagggtgggatgagagtcttcttggcccttcacagtgattccagaggacacccagctagcctggagccccagccacttgaacccctatgatggacataggcggaaggagcagctagcccacaacccagctgcttggcaaaaacacgaagggcatttccactgcttcctcccagctcctgcagcctgctatcagcaccacacctggtcaagcctgggcrgcaggggagaggacagcagtggctccagcatgtccttccttcacatcctgctgacagttcattcaggggatgctcctctgagctggcaatctcaggaccagggaggcagcctgaaaaccagcctgctctggcccatatcactcccggagaatgttaccagttattgaaaatttgtttcttgcattgggataaatcaagggctactgaatgccaacgcagaggcaggggtcatgggtaggagctgcctccagtgggccctgagacctctctccaccgggtggggccgagtcatactagcga

SEQ ID NO: 595 - DNA, 601 bp, Human
atggggattaaatgagatgatgcatgtaaagcactgagcacagaagcccagcacacgataagaactcaaaaaagtggaagatgctattattaataataatatgttttgacttatctatgaaattgcaacaacagctccttctttaccttcttaaaaagaggtctatggatgagctctgaagtagaggcttctgtccatcctgggcctagtgtatcctctgcctgctcagggttcctctggatcttttatgctgggcctgtttggcaagacactgggcaggaattcactcttcatggccaamcccagaagccggggcctgaatgcatcctttctctcctgtcctgggtccagctaagcctgagttatctgaatgatctgaaaccaaccagctttttcccaagccctgcagtgtaaggtccccaggacagacaatgggagggaatttagaactcacctgctccaggctaagactcacaggaaaagctgagggcagactatggcccctaccttcagagttggagggtgggatgagagtcttcttggcccttcacagtgattccagaggacacccagctagcctggagccccagccacttgaacc

SEQ ID NO: 596 - DNA, 601 bp, Human
agctggaaagtgatgcaaagcagtcataaagcggagttttatctggttttatctctgttctgagctgcaagtgtggtgcccccatctgcagcagaatacctacagggcccccatagcccaggtccctacccactctgcatcactgagggcgagacccaggaatgtgtgattccttcatgcacttaattttgccctagtgaaatcatgtgcaagatcaaaatgtgtaaaactgagacccaaatggcaggtgttgagccagattccttgcaggcctcggccactccctggatttatatgaggygccaccctggaagctgcctgccctgagggcattcactccagcaacacagaggagggttgcactgtagttctcacagcctgggaaatgcagatgctgcactcagatctagggccccagccagccagggagtagctgaggctggggagacgctggctcctcaggaatctggcattcagagctgttggacactgccaggtcctcagtagcatataatccagcatcctgagctgacggtgagggggcctggcctgagtctctccaatgcctctgactgtgaccttggctaacctagctccttaa

SEQ ID NO: 597 - DNA, 601 bp, Human
gttattaggaactttctgccctgttcagatgaggccagctggaaagtgatgcaaagcagtcataaagcggagttttatctggttttatctctgttctgagctgcaagtgtggtgcccccatctgcagcagaatacctacagggcccccatagcccaggtccctacccactctgcatcactgagggcgagacccaggaatgtgtgattccttcatgcacttaattttgccctagtgaaatcatgtgcaagatcaaaatgtgtaaaactgagacccaaatggcaggtgttgagccagattccytgcaggcctcggccactccctggatttatatgaggtgccaccctggaagctgcctgccctgagggcattcactccagcaacacagaggagggttgcactgtagttctcacagcctgggaaatgcagatgctgcactcagatctagggccccagccagccagggagtagctgaggctggggagacgctggctcctcaggaatctggcattcagagctgttggacactgccaggtcctcagtagcatataatccagcatcctgagctgacggtgagggggcctggcctgagtctctccaatg

SEQ ID NO: 598 - DNA, 601 bp, Human
cttgatatggagtaaagaaaaataccagctttgtagtcgggcccctggattggagtcggggctttggtctaaagcttggcaggccatgcgctgtacaggtctggagagcacgctctcatttgtgtcttgtgtgtggatggcggtgctggagctgctcggggtacaggctacacacctgggcgcaggtcctaccttggagtcctggctctgcttggattggctgtagaatttttggcaaatttctcactctttctgagccctgaagcttcatcacttaaatgggtgaatatcggtttcaaargatattatgaaagaaggacttcacacagagctatctaaggaaaccagggagggacacaggccaagtgggctgtgtatttgaaatcgagatcatgtgctcaattgcctacagggctcatgaaggtattgtcagagggtgaagcaggcaaagcaatgagatgacaggtgcccactgactcttgccttggtgccaggaagaattgccagggtgtggcagggcctgtcaatagggagagagccagctgcctccagacaggcagtcaccactccctccaggcaatggatgtcaggccatccagaa

SEQ ID NO: 599 - DNA, 601 bp, Human
agccaagggcttgatatggagtaaagaaaaataccagctttgtagtcgggcccctggattggagtcggggctttggtctaaagcttggcaggccatgcgctgtacaggtctggagagcacgctctcatttgtgtcttgtgtgtggatggcggtgctggagctgctcggggtacaggctacacacctgggcgcaggtcctaccttggagtcctggctctgcttggattggctgtagaatttttggcaaatttctcactctttctgagccctgaagcttcatcacttaaatgggtgaatatcrgtttcaaaggatattatgaaagaaggacttcacacagagctatctaaggaaaccagggagggacacaggccaagtgggctgtgtatttgaaatcgagatcatgtgctcaattgcctacagggctcatgaaggtattgtcagagggtgaagcaggcaaagcaatgagatgacaggtgcccactgactcttgccttggtgccaggaagaattgccagggtgtggcagggcctgtcaatagggagagagccagctgcctccagacaggcagtcaccactccctccaggcaatggatgtcaggc

SEQ ID NO: 600 - DNA, 601 bp, Human
accttctccacgtcggcccgggccgtctggtaattgtccacgctgcctgggatgtaggagcactgtggggagaaacaagagcagctgtgggcttggaaatccccatttcttagccaagggcttgatatggagtaaagaaaaataccagctttgtagtcgggcccctggattggagtcggggctttggtctaaagcttggcaggccatgcgctgtacaggtctggagagcacgctctcatttgtgtcttgtgtgtggatggcggtgctggagctgctcggggtacaggctacacacctgggygcaggtcctaccttggagtcctggctctgcttggattggctgtagaatttttggcaaatttctcactctttctgagccctgaagcttcatcacttaaatgggtgaatatcggtttcaaaggatattatgaaagaaggacttcacacagagctatctaaggaaaccagggagggacacaggccaagtgggctgtgtatttgaaatcgagatcatgtgctcaattgcctacagggctcatgaaggtattgtcagagggtgaagcaggcaaagcaatgagatgacaggtgcccactgactctt

SEQ ID NO: 601 - DNA, 601 bp, Human
gacgctggtttcgttcccccgaggtgcggagaagcagtagaagacctgctgctcttggaatttggctctgaccttctccacgtcggcccgggccgtctggtaattgtccacgctgcctgggatgtaggagcactgtggggagaaacaagagcagctgtgggcttggaaatccccatttcttagccaagggcttgatatggagtaaagaaaaataccagctttgtagtcgggcccctggattggagtcggggctttggtctaaagcttggcaggccatgcgctgtacaggtctggagagcaygctctcatttgtgtcttgtgtgtggatggcggtgctggagctgctcggggtacaggctacacacctgggcgcaggtcctaccttggagtcctggctctgcttggattggctgtagaatttttggcaaatttctcactctttctgagccctgaagcttcatcacttaaatgggtgaatatcggtttcaaaggatattatgaaagaaggacttcacacagagctatctaaggaaaccagggagggacacaggccaagtgggctgtgtatttgaaatcgagatcatgtgctcaattgcctaca

SEQ ID NO: 602 - DNA, 601 bp, Human
gatggctctacttctgggccgccaggatggacaggtactggttgctcttcaccatggcgataatgaggaggccaccggtcagcaggaaggtgggccagaagagggagaagaggagggcctggggcccgtagaggcgctggaataggacgctggtttcgttcccccgaggtgcggagaagcagtagaagacctgctgctcttggaatttggctctgaccttctccacgtcggcccgggccgtctggtaattgtccacgctgcctgggatgtaggagcactgtggggagaaacaagagcagcygtgggcttggaaatccccatttcttagccaagggcttgatatggagtaaagaaaaataccagctttgtagtcgggcccctggattggagtcggggctttggtctaaagcttggcaggccatgcgctgtacaggtctggagagcacgctctcatttgtgtcttgtgtgtggatggcggtgctggagctgctcggggtacaggctacacacctgggcgcaggtcctaccttggagtcctggctctgcttggattggctgtagaatttttggcaaatttctcactctttctgagccctgaagc

SEQ ID NO: 603 - DNA, 601 bp, Human
gcccagccagtcccctgtgccctgacaagtggtatggcatggatggatggctctacttctgggccgccaggatggacaggtactggttgctcttcaccatggcgataatgaggaggccaccggtcagcaggaaggtgggccagaagagggagaagaggagggcctggggcccgtagaggcgctggaataggacgctggtttcgttcccccgaggtgcggagaagcagtagaagacctgctgctcttggaatttggctctgaccttctccacgtcggcccgggccgtctggtaattgtccasgctgcctgggatgtaggagcactgtggggagaaacaagagcagctgtgggcttggaaatccccatttcttagccaagggcttgatatggagtaaagaaaaataccagctttgtagtcgggcccctggattggagtcggggctttggtctaaagcttggcaggccatgcgctgtacaggtctggagagcacgctctcatttgtgtcttgtgtgtggatggcggtgctggagctgctcggggtacaggctacacacctgggcgcaggtcctaccttggagtcctggctctgcttggattggc

SEQ ID NO: 604 - DNA, 601 bp, Human
acgtttatgagatgcccagcatgttaagaactttacttttgttatcataatgaattcccctaacatagagaaatgtactattacaggccctgttttatagatgagaacactgtcttagcaagatagttcatttcacgtataccatgttgaacacacagtacagcacacagtgagtcctctgtatgtgttaattactggtattttcctaggacttggcaacaagcattttgagaaatttattctgcccttgaacatctttgagcccattgagatgttctccaacgcaaacagtaggttaagygtcctcactttacaatggcaaatcacttaatggaggtcatgtgggttcctgaaatgtttgatgaaagcctctggtttgaatgttacaacactactggttagtctttatatattagtttatctcttcctaaaatatcacggtaaaaacaaggcttagttaaaaactgatttttttttttttttttttttttttgagacggagtctcacactgtctcctgggctggagtgcaatggtgcgatctccgctcactgcaacctccgcctcctcggttcaaggactcttgcgtctcagcctcccaa

SEQ ID NO: 605 - DNA, 601 bp, Human
ataccaaatattgtctataaggctaggtgtggtggcttatgtctataatcccagtgctttgggaagcccaggcgggaagataccttgaggccaggagttcgagaccagtctgagtaatgtagaaacaccctatctctaaaaaaaagaaaaaaaattagccagatgaacacctgtagtcccagctaccctggaagcagaggtgggaaaatcacataataacctcaaatcagtaaatgtttatggaataactattataaacaacatttaaaatcaccatgattactttgaacacacgttatayagagattggatatagagaagtcaaaggcccacacatccctcacccaaatctgggctctcaaaataagcaggcaaaagtcttaaacacaaagcataataaggacacattgttatgccaattagaggctttttttttttgccaattaagattaattcagtatggcttgaaaccaagtggaaaatgttcttaaacaaaaggaatcaaacagtgaaaacaagttaagcattaaaagcttaaacatgttaagcattaaaacatgttaagcattaagttacctgtgctgacatccatatgtctcat

SEQ ID NO: 606 - DNA, 601 bp, Human
taagcattaagttacctgtgctgacatccatatgtctcattttattgcccaatggaatataatcaaacccaagcattcctctacttagcacaaaggtaaaattggcataaaatataagcattatgaaagtataatggattaaccatggcacgggttattcttttctttcaggcaggtccaaaatgtggctgcttttaacaatggcaagtttgatatctgtactggggactacacatggtttgtttggaaaattacatcctggaagccctgaagtgactatgaacattgtaagttactctgsggaaaaactctataaaactaaaagatgctattatttaaaatcataatgagttaaagattttatatgaccaattaaaaataaacagtaatattcatttattagatatatctaaaaatcaactaaaatttaaacttttgggtttgcttcctcagagtcagatgattacttattggggatacccaaatgaagaatatgaagttgtgactgaagatggttatattcttgaagtcaatagaattccttatgggaagaaaaattcagggaatacaggtatatataagcttcttttcttccttcctt

SEQ ID NO: 607 - DNA, 601 bp, Human
aagtgattttccaaatggaatgaacaatatggctgaagcaaggaaactcacagcccctggaaaattccaaaggaatgtccatatggattcaagagagaagtaaaaacccatttaggggtaggagaacagcaatctgaatcatcatcaataggaggggtggggagagtgaaattcagatatcatggagagattatcatgggcttctctcactggtcttcttgtgccttattcctggaaattactgatggaggtagagaacagaacaaaacctggctgctgatgctaaggcatgaaagtgttycaagagttctaggagctgaaaggaaacctgtgtgtcccaggtgtagcgggaaaagggaaaatgacatgagtgaagactgaggtgcagatggggcagtagtggtgatagtgagagccttgggcctcattctgagtgcactgagaagttttaaaaagaggagtggcataatacagttttcattttcaaaatatcatgttggctgatttgtgaaaaataaaatagagaaagataggatttatattaaatgacatggaacacagcatacacattattattaaatctgacatttcatttcaggga

SEQ ID NO: 608 - DNA, 601 bp, Human
cctacagatactatcttgtttggattcaattgtggctgcaatgctgcgcttcagaaatgatgtcagttgtttataagaagctgccccaaagggcacctgacatccactgatggtctataagcatcaatgtttagagaatccagttttctgtatcccaaagggatcattagctataaatgcttgaattttagaaacaatagcaaggaaatgtattcactttcattttgtctttttcctttcagctttgatgaaatggctaaatatgaccttccagccacaatcgacttcattgtaaagaaarctggacagaagcagctacactatgttggccattcccagggcaccaccattggtaagtaatggcagtcaaggccaagtggtttacttctcataaacactttcccagtggttatggtaggcatgttagcaaccacactaattgctttccattcatttaatgcctccaacaacacaatgacatagggacaattataattcctattatatgggaaaacaaaacaaggggatacagttcgtgcaaggttacatggattattaccaatagggtagctcaggcagtctgactcccaagcacatactc

SEQ ID NO: 609 - DNA, 601 bp, Human
atcagatgttccaggaagacagaatagcaagtgagaagaatctgaagctggagcacacctagtttgttcaaggaacagcagtgaggctatgccttgtgtggatgaatcaaattgagaaagagacagagagagtgagagatgagatcacagatgttggggaggaaagactgttcggggctctttggctgttgtagggattttagctttcactctgataaaaaaagaaaactgcagaataattttgaatcgaagagttacatgattcataacaggatcccttttgttgccaggggcaaagagscaggagcagagaaccaattagaggactcttatagtacccatgcaggagatggtggtgacctggatgaagggtgttcttggaaaaaccattcttccacaaatagaaccagactacatattatatagttgtctatatctgaaagggttttttttaggccattcttgagtatcatcgatatgtcattattgacagtgggagggccttgcctatgtagctatactgcagcgttaaacttgataactacttgatcacatcctcatctgccagtatactactgcttacaaaattaattcattactg

SEQ ID NO: 610 - DNA, 601 bp, Human
ggggagggaaagggagaaaaggaggaaataaatcagtgattgagtgaggcaaacaccttgagatctctcatggctttcccttttggctttcctaagagctccttcatctttaaatgggcgatctcataagtcagtggtgtggatttcaataaattataaatattaagtgccttatgcagtaggcacacatgttatggaattaatcgttttgtttgacaatgcttaataccctaattctctcacccagtaaaaccaacacacacacacacacacacacacacacacacacacacacacaccwctctctctctctctctctctttcctttaggggaacggtttagcctcaggttataaaatataaggattccatttccttctatggttttgtactattcatctcttttcattctgtattaatatgtatgtctaaagcctaagagaacttacctataggcaaactacatttggaaaacttttattaaaatctaaaattttttgatggcccagaaatatttattggctacattgattgagaacttatttcctactcatactcagattttctgataggcaatgcagacgtagattaaaatttagaa

SEQ ID NO: 611 - DNA, 601 bp, Human
ataaacaacatgaagaaaaaacacaattcactactcacttatgaccacctaaatactaggtgttacatttaaattctgtaagagaaaggactgaaccatatattttagcaggctcctttgtgagaaaaatgtctagatattgaataaatgttttcaataaatatttctaatgctgacagtcattttgataaatcttacagactatatttctgagcaactatttatgtaagactttgcccatattctttttttgagatagagtctcgctgtcacccaggctggagtgcagtggcgcgatctsggctcatagcaagctccgcctcttgggttcacgccattctcctgcctcagcctcccgagtagctggaactacaggcgcccgccaccacgcccggctaattttttgtatttttagtacagtcggggtttcatcgcgttagccaggatggtctcaatttcctgacctcatgatccacacgcctcagcttcccaaagtgctgggattacaggcgtgagccaccacgcccggctgactttgcccatattctttatctaccttttcattcactttgtattgagttggagtttcaaaacatatgga

SEQ ID NO: 612 - DNA, 601 bp, Human
tagcactgggtagagaagcataaaagctgagaatttagactcagagacccaaattaaagtatctgtctccattctgtgtggatcttggacatttctttaaacttctttgtgccccaattttcatgttgataaaatggaactaataagttctcctcattaggcagctacaaattaaatgggttaacacatgcaattgcactttgcaaattctgaagtgacatacaaatgtgttgttcatatccttccagtaaatgctacctttaaacacttgacctgaatcagaaaacataaatctttactktttttaagaaactgagtatgtgtcttagtatgtatataatatgtgtgtctgttgatttctagagtcgcttggatgtgtatctatcacataatccagcaggaacttctgttcaaaacatgttccattggacccaggtattcttttccaaatgctgttaaaatgtattttgtgagtctcaacccttttcactttacctaaacacattcttaaaatatcctgctgagtacacctggaaggtaatttttctggcactgactaccatacaaaaataactatgaatttatttcaaagaagaaaatg

SEQ ID NO: 613 - DNA, 601 bp, Human
gaaactgagtatgtgtcttagtatgtatataatatgtgtgtctgttgatttctagagtcgcttggatgtgtatctatcacataatccagcaggaacttctgttcaaaacatgttccattggacccaggtattcttttccaaatgctgttaaaatgtattttgtgagtctcaacccttttcactttacctaaacacattcttaaaatatcctgctgagtacacctggaaggtaatttttctggcactgactaccatacaaaaataactatgaatttatttcaaagaagaaaatgctttttawtttattttattattattatactttaagttttaaggtacatgtgtacaacgtgcaggtttgttacatatgtatacatgtgccatgttggtgtgctgcacccactaactcgtcatttagcattaggtatatctcctaatgctatccctccccccagcaaatgctttttatgacttggtatgcaagaaaaattattttgagtgaagctgcatttaaacttacataaataccttgtcctagattattaataatcttttggaatgagaaaaatgtttcttaataattgtttaaattgaaaataaa

SEQ ID NO: 614 - DNA, 601 bp, Human
gtttgaattttatttttcacaatataataatttttatttgtttgcttttaatttctctatgttaggctgttaagtctgggaaattccaagcttatgactggggaagcccagttcagaataggatgcactatgatcaggtaagcttcttaaagatggaattattcacattttgaacaacaatactaactatttaaatgttaaagaagaaattatgttaactgcgcatctgttttccaaaggaatgttgatgttctgtctctcattctcccacatgactatgcattcctgctctggtggctaygctcatttaaagaggtttacaaagctgccctcaaagtactacacccctgtgtgtgagagacttcccaggacttaccactacccattgccattacacagacctgtcccatatcccagatccccagcacactgtcctctcctttctgaagtactaatacctgatataataagctaataattctaactgttcatggaatttctggtcttcttaaacaataccctttcctttgttgacagccagaggagtgatttcaatgggatatattcccaaatagaagaaaaagatgccgtgcttgcaggt

SEQ ID NO: 615 - DNA, 601 bp, Human
atgttaaagaagaaattatgttaactgcgcatctgttttccaaaggaatgttgatgttctgtctctcattctcccacatgactatgcattcctgctctggtggctacgctcatttaaagaggtttacaaagctgccctcaaagtactacacccctgtgtgtgagagacttcccaggacttaccactacccattgccattacacagacctgtcccatatcccagatccccagcacactgtcctctcctttctgaagtactaatacctgatataataagctaataattctaactgttcatggmatttctggtcttcttaaacaataccctttcctttgttgacagccagaggagtgatttcaatgggatatattcccaaatagaagaaaaagatgccgtgcttgcaggtcaaggctggaaatattttacaataggcagaggcctttggcataggcagacatattaagcagtcctcacacttgctgtaataagaatccagactttggagcttatcttatctgcagtcaatatgagtttgggcagtcatttcttcatctctccacccaggctcaggaagttgttgacaggatttagtgctataat

SEQ ID NO: 616 - DNA, 601 bp, Human
tttcagaatagcatgagatcaaacttttgttgaaaacattttttcctccaccatcactttctcaaatctccaaaacacacaggcttgctttgagtctctctttctactggactctaatactcataatcagaggacttcatcttagaggaacaagaaacccagtccccaagtccacccttcttccaactaaaccaataatataccaggttggtctttaactaactgaagcaatgacactaatttaagagccagggccagcatctagaaaactctttgaataataggatgtaagtaaaataarctgggtttataattatgaatattctccacacactcccttttctctaatatttaggaaatataatagaaatcatgaaaatattagggaaaattacatatcataaaatattttgctatggcaagttggctattacacaaaatgtgagaatacagaaacttttagtatattggattactattcttgaaactatgatctaaaaaaatctaacaaaattctctctgggcagcaagaaaatttgagataattctcttattcctttttctgctttgtaaacctctttaaaatctatgtgtgaattgt

SEQ ID NO: 617 - DNA, 601 bp, Human
ctattcttgaaactatgatctaaaaaaatctaacaaaattctctctgggcagcaagaaaatttgagataattctcttattcctttttctgctttgtaaacctctttaaaatctatgtgtgaattgtgattttcgagaaacaggacatggggatgataataccctttctcagaatttgaagcaacattttgtaaatactcaggtaagtattcaacaattacagctccataactgaaacaactgacctatcccctgaccataactgggaagtcaatacaaagccaaaataaatgactcaggayattttgagatcatattttagagtgtttgggtagaaacaacctattaacaattagaatctaatcaaatccatttcccttagcttgagttgcaatctatgttcttaatttgtaagacttactgtccaaagccttgctattcagagcatggtttggagccaatggcatcagcatcacctatgaatgcagaatctcaggctgttccccagatctactgaaacagaatttttacttcaacaagatcttcaggtaattcacaggcccattagaatttgacaagcacttatctaaaacatattgcat

SEQ ID NO: 618 - DNA, 601 bp, Human
ccctgaccataactgggaagtcaatacaaagccaaaataaatgactcaggacattttgagatcatattttagagtgtttgggtagaaacaacctattaacaattagaatctaatcaaatccatttcccttagcttgagttgcaatctatgttcttaatttgtaagacttactgtccaaagccttgctattcagagcatggtttggagccaatggcatcagcatcacctatgaatgcagaatctcaggctgttccccagatctactgaaacagaatttttacttcaacaagatcttcaggtrattcacaggcccattagaatttgacaagcacttatctaaaacatattgcattcactttgctctgtggataaaggtggttttctctgtgcaatcattgctagaattcacttataaaaccgccagttaatgttatacactctacttgaatagtaagtactgggtttaaagtgtggttacctaaactctggttctttctcttgtgttttctagtcccagcctccctactacaatgtgacagccatgaatgtaccaattgcagtgtggaacggtggcaaggacctgttggctgacccccaagat

SEQ ID NO: 619 - DNA, 601 bp, Human
tcagcatcacctatgaatgcagaatctcaggctgttccccagatctactgaaacagaatttttacttcaacaagatcttcaggtaattcacaggcccattagaatttgacaagcacttatctaaaacatattgcattcactttgctctgtggataaaggtggttttctctgtgcaatcattgctagaattcacttataaaaccgccagttaatgttatacactctacttgaatagtaagtactgggtttaaagtgtggttacctaaactctggttctttctcttgtgttttctagtcccarcctccctactacaatgtgacagccatgaatgtaccaattgcagtgtggaacggtggcaaggacctgttggctgacccccaagatgttggccttttgcttccaaaactccccaatcttatttaccacaaggagattcctttttacaatcacttggactttatctgggcaatggatgcccctcaagaagtttacaatgacattgtttctatgatatcagaagataaaaagtagttctggatttaaagaattatccgtttgtttttccaaaatactttattctctcatacatagtattttcat

SEQ ID NO: 620 - DNA, 601 bp, Human
catccattcatctacccatctatccatttctctatccttttaaccacttagccacttacccattcacttattcctctacccatccacccagacacctatcttatcattcttctggccctctggccattatttgatcttccctccatccattcatcttcccagctgttcatctcaactctccatccatccatctgatttactttgaaaaaccaaacgttgttttccttaggcaaaattcaacttggcaggggcaaggcaatgattgtaggcacagattcaagaaacgggcaaatatgaatgrctattttatctcaaacaataaggaaaacacttgggaagcacatagtggaaatctctgagttaattccagttgatgtgcagttattaatgtaaacaggtttgtttggagactatagcattagagggatacacactgtgttgggaatctggctcatagtggcaagttcttccattctgagagaatagaatcctacttagtaggcattgggagagaatataactgtttttaaaatatggaaagaatgacacctcaaaagaggataattcaaaaacaatgggatattagagaataaaggaaaca

SEQ ID NO: 621 - DNA, 601 bp, Human
ataggtacacatatgaagcctgtggccatctcatccatgctgtgtggcctcagcatctggcttctgctgggcatgtgaggtgcttggtaaatatgtgttagatgaatgcataacctgtacaataaagttaggttctgtttttgcactaacttttacataaaaatgtttgtgttgaattaaatgtccttgacaaattcctgtaatacacatgagatgctaacaaatggcacctgctgaaccacatgcatctttaaacataagacattgccccaaatagtcctgtaacaaacttagagcattmatatgccaccccaaatattcgacttagctgtaggtaaaaactaaaacagtggaaatctggagtccagtatttttaaaaggtgtgttctgcacaaatacttttatgttatggcagcccctggatgtgtatgaagtcatccaaggtgtttgcagaaaaccaacaacagcaactattgtttagagaagtgatagatcgcaatcatgttatgtattcatatatccagctgatataacattttatgtctatattttcagaggatccctcaaaccagatgcaagtcacacgtgtgctattgatgtg

SEQ ID NO: 622 - DNA, 601 bp, Human
cacatacccaacacacaccccatcctcacacacataggtacacatatgaagcctgtggccatctcatccatgctgtgtggcctcagcatctggcttctgctgggcatgtgaggtgcttggtaaatatgtgttagatgaatgcataacctgtacaataaagttaggttctgtttttgcactaacttttacataaaaatgtttgtgttgaattaaatgtccttgacaaattcctgtaatacacatgagatgctaacaaatggcacctgctgaaccacatgcatctttaaacataagacattgycccaaatagtcctgtaacaaacttagagcattaatatgccaccccaaatattcgacttagctgtaggtaaaaactaaaacagtggaaatctggagtccagtatttttaaaaggtgtgttctgcacaaatacttttatgttatggcagcccctggatgtgtatgaagtcatccaaggtgtttgcagaaaaccaacaacagcaactattgtttagagaagtgatagatcgcaatcatgttatgtattcatatatccagctgatataacattttatgtctatattttcagaggatccctcaaa

SEQ ID NO: 623 - DNA, 601 bp, Human
ttttgttggggatttttgtgtctgtgttcatcagggatattgcctatagttttctttctgacttggattttgtaaatatcaaaatctcttcaggcaaggcacatctgtatggcacatacccaacacacaccccatcctcacacacataggtacacatatgaagcctgtggccatctcatccatgctgtgtggcctcagcatctggcttctgctgggcatgtgaggtgcttggtaaatatgtgttagatgaatgcataacctgtacaataaagttaggttctgtttttgcactaacttttayataaaaatgtttgtgttgaattaaatgtccttgacaaattcctgtaatacacatgagatgctaacaaatggcacctgctgaaccacatgcatctttaaacataagacattgccccaaatagtcctgtaacaaacttagagcattaatatgccaccccaaatattcgacttagctgtaggtaaaaactaaaacagtggaaatctggagtccagtatttttaaaaggtgtgttctgcacaaatacttttatgttatggcagcccctggatgtgtatgaagtcatccaaggtgtttgcagaaa

SEQ ID NO: 624 - DNA, 601 bp, Human
aatagattattcaaaattgattgagtataaagtgctttataaatctaggcatctattatacagaaccactgaatcctagaatgtcagagctggaagaaagtctcaatgtctagttcaattgtcccattttacatatgagaagagtgaggcccagagagagggaactcactatttaaaatgagtcatgtgctaactccttttggaatgtcagtcacctgactagattgttttttctttttttgttattttattttattttagattcagggggtgcatgtgcagattcattacatgggtataytgtgtaatggtgaggtttggacttctagtgaacctattacccaaacggtgaacattgaacccaatggataaattttatcccttatccccatcccaacctctctccttttggagttcccagtgtctattctttccagttttatgtccatatgtacccattgtttataagtgagaacatgcagtatttgattttctgtttatgagttatttcgctgaagataatggccttcagcttcatccatgtagctacaaaagacatgatttcattcttttttatggctgcatagtattttatgttgtc

SEQ ID NO: 625 - DNA, 601 bp, Human
gtaatgtgaaatgatcatactttccataatagattattcaaaattgattgagtataaagtgctttataaatctaggcatctattatacagaaccactgaatcctagaatgtcagagctggaagaaagtctcaatgtctagttcaattgtcccattttacatatgagaagagtgaggcccagagagagggaactcactatttaaaatgagtcatgtgctaactccttttggaatgtcagtcacctgactagattgttttttctttttttgttattttattttattttagattcagggggtgmatgtgcagattcattacatgggtatattgtgtaatggtgaggtttggacttctagtgaacctattacccaaacggtgaacattgaacccaatggataaattttatcccttatccccatcccaacctctctccttttggagttcccagtgtctattctttccagttttatgtccatatgtacccattgtttataagtgagaacatgcagtatttgattttctgtttatgagttatttcgctgaagataatggccttcagcttcatccatgtagctacaaaagacatgatttcattcttttt

SEQ ID NO: 626 - DNA, 601 bp, Human
cccaggaattcaattaagtcacagtcctattgcctctcacccctggaggattcagagcttggaacaataatattttcatagatcattttttcaataagatgagttcattaaatgggttgtatttctttggacaggttggagatataaggtatcagtcacactttctggaaaagagaaagtgaatgggtacatcaggattgctttgtatggaagtaatgaaaactcgaaacaatatgagattttcaagtaagttcaatggtaatgtgaaatgatcatactttccataatagattattcaaamttgattgagtataaagtgctttataaatctaggcatctattatacagaaccactgaatcctagaatgtcagagctggaagaaagtctcaatgtctagttcaattgtcccattttacatatgagaagagtgaggcccagagagagggaactcactatttaaaatgagtcatgtgctaactccttttggaatgtcagtcacctgactagattgttttttctttttttgttattttattttattttagattcagggggtgcatgtgcagattcattacatgggtatattgtgtaatggtgagg

SEQ ID NO: 627 - DNA, 601 bp, Human
gctgaactataatatttactgacccctgagtcccttgctcccacctagaacctaatgtacccttaattcctgggccccaggaattcaattaagtcacagtcctattgcctctcacccctggaggattcagagcttggaacaataatattttcatagatcattttttcaataagatgagttcattaaatgggttgtatttctttggacaggttggagatataaggtatcagtcacactttctggaaaagagaaagtgaatgggtacatcaggattgctttgtatggaagtaatgaaaactcraaacaatatgagattttcaagtaagttcaatggtaatgtgaaatgatcatactttccataatagattattcaaaattgattgagtataaagtgctttataaatctaggcatctattatacagaaccactgaatcctagaatgtcagagctggaagaaagtctcaatgtctagttcaattgtcccattttacatatgagaagagtgaggcccagagagagggaactcactatttaaaatgagtcatgtgctaactccttttggaatgtcagtcacctgactagattgttttttcttttttt

SEQ ID NO: 628 - DNA, 601 bp, Human
caaaatacacatgtgcagtatcagctgcccttcattcatccaagagcacataccttgctgtgttcataagggactgtgctgaactataatatttactgacccctgagtcccttgctcccacctagaacctaatgtacccttaattcctgggccccaggaattcaattaagtcacagtcctattgcctctcacccctggaggattcagagcttggaacaataatattttcatagatcattttttcaataagatgagttcattaaatgggttgtatttctttggacaggttggagatataagrtatcagtcacactttctggaaaagagaaagtgaatgggtacatcaggattgctttgtatggaagtaatgaaaactcgaaacaatatgagattttcaagtaagttcaatggtaatgtgaaatgatcatactttccataatagattattcaaaattgattgagtataaagtgctttataaatctaggcatctattatacagaaccactgaatcctagaatgtcagagctggaagaaagtctcaatgtctagttcaattgtcccattttacatatgagaagagtgaggcccagagagagggaa

SEQ ID NO: 629 - DNA, 601 bp, Human
agcatggatgcatgggtgcatgggtagatagatgcaggagtgcatgagtcagtgggtagatgagagaatggatggacacatggatgcatgggtgcatgggtagatagatgcaggaatggatggattagtggataggtatgagaatggatggatgggtagatgaaaggatggataagggatggatgagtagatggatggttgcataggtaaatgaaaggtggatggttgggtgggtgatgggtagataggtagatagacataggaaggaagctgaattgattgactaacagacaaattatgkttttttttttccactagagtaagtgtttcccttgtccagctgaaggatgccccaaaatggggcactatgctgaccaatttaaggggaaaacaagtgctgtggaacaaacctttttcctgaacacaggagagagtggtaactttactagtaagtttccattttactcacttcaaattcttgcgaataattttcaaaagtgtgccaaccttattagtcagtatccttggtaacaatggatagaaacttaactacaacaagcttaagttgtaatgaaaggacagtgaaatggaatttgtgttg

SEQ ID NO: 630 - DNA, 601 bp, Human
atttcataccccattcatattttaattttactgcttcctggatatgacttgttttcccaactatattccaagtttttgaggcacttatttggatactctgcagggcctagcacagttctatgcacaattccaagggtggaagcatggatgcatgggtgcatgggtagatagatgcaggagtgcatgagtcagtgggtagatgagagaatggatggacacatggatgcatgggtgcatgggtagatagatgcaggaatggatggattagtggataggtatgagaatggatggatgggtagaygaaaggatggataagggatggatgagtagatggatggttgcataggtaaatgaaaggtggatggttgggtgggtgatgggtagataggtagatagacataggaaggaagctgaattgattgactaacagacaaattatgtttttttttttccactagagtaagtgtttcccttgtccagctgaaggatgccccaaaatggggcactatgctgaccaatttaaggggaaaacaagtgctgtggaacaaacctttttcctgaacacaggagagagtggtaactttactagtaagtttccatt

SEQ ID NO: 631 - DNA, 601 bp, Human
catttctccatgggaagttttctaccaagtagccagagaaatgaaaaaacacctttccggactttttctaaagaaaaggatgataaataaaatgcagtaagagagtggccagaggccatggccaccttgccatcaccgcttttaccttgtgccctgcatagcaaagaggaagaatcaaaaagcctggttgatggggaaggcctgcccggtatgtcctcacagggatcctcacagggataggatgcggtctgcagcagcattggatgggccggcatggtaactgtttttaagatggggatgygctgccttcactcacgcatgcgaaggttttcaggtagaagtggagatcctggcttcttatgaaaaaatcagaggaccaggcgatttggggctttgaacatgtgacacctggctagactgtgtagggttagaggggccctttttacagctattgctatcttctcttagtctctctctctctctctgtatgtatgtgtatatatacatatatatacatatatacatatatgtatgtgtatatatacatatatacacacatatagtatgtgtatatatacatatatacatatatagtatgtgt

SEQ ID NO: 632 - DNA, 601 bp, Human
caatgcaatgagatagttactctgattagttccagtttgcagatccaaaaactgaggatccgaaaaattacataactcaattgggcgtggtggctcatgcctataatcccagcactttgggaggctgaggtaggcagatcacttgaggtcaggagttcaaggacagcctggccaacatagtgaaaccccatctctactaaaaacacaaaaattagttgaatgtgatggcatgcgcctgtagtcctagctactcaggaggctaagatatgagagtcacttgaacccaggaggtggaggttgyggtgagccgagatagcaccactgcaccagcctgggtgacggagtgagactgtctcgaaatatatatataaaaaaagttacatagctcattcaaggccgctctatatctaagcccaatttctaactataaagccctgagctcatgccccagcctgtgtatctccctgttgtcggcatcctgggacagcggcttggctggcatgttggctctggctttgaccacctatcctacctgcagcacctgctccttgaagaactgcaggacataggccaagatttgaaggccttgacttgcttgctg

SEQ ID NO: 633 - DNA, 601 bp, Human
gccttcataatgctgacatttgccaccgtttatggagtgttgtgaaaatgtgccaggcattttcacagcaatgcaatgagatagttactctgattagttccagtttgcagatccaaaaactgaggatccgaaaaattacataactcaattgggcgtggtggctcatgcctataatcccagcactttgggaggctgaggtaggcagatcacttgaggtcaggagttcaaggacagcctggccaacatagtgaaaccccatctctactaaaaacacaaaaattagttgaatgtgatggcatgygcctgtagtcctagctactcaggaggctaagatatgagagtcacttgaacccaggaggtggaggttgcggtgagccgagatagcaccactgcaccagcctgggtgacggagtgagactgtctcgaaatatatatataaaaaaagttacatagctcattcaaggccgctctatatctaagcccaatttctaactataaagccctgagctcatgccccagcctgtgtatctccctgttgtcggcatcctgggacagcggcttggctggcatgttggctctggctttgaccacctatcctacc

SEQ ID NO: 634 - DNA, 601 bp, Human
caaaaggtgggccatctggatttctttccaaatggaggaaaggaaatgcccggatgtaagaaaaatgtcctttcaaccattactgatattgatggaatatgggaaggtatgtaaattaaagaagtaagacagcaattgctctgttcggggagaaagcagaatgcatggtctggccttcataatgctgacatttgccaccgtttatggagtgttgtgaaaatgtgccaggcattttcacagcaatgcaatgagatagttactctgattagttccagtttgcagatccaaaaactgaggatcmgaaaaattacataactcaattgggcgtggtggctcatgcctataatcccagcactttgggaggctgaggtaggcagatcacttgaggtcaggagttcaaggacagcctggccaacatagtgaaaccccatctctactaaaaacacaaaaattagttgaatgtgatggcatgcgcctgtagtcctagctactcaggaggctaagatatgagagtcacttgaacccaggaggtggaggttgcggtgagccgagatagcaccactgcaccagcctgggtgacggagtgagactgtctcgaaat

SEQ ID NO: 635 - DNA, 601 bp, Human
aattctgtaacactctaaaaagtgggctttattaccaccatttcatggctgaggaactgaggctcaattaggttaagtaattgacccagatcacaaaatctgtaagtaaaaccaggatttgatcacgggttcatatgctttgaaagccaaagagcctagccatatgctacggctcacaatataacaatataatgttatgtagtctccacataacaatataatgtagacatcaaaattttaaaatgagtaaagtaatacaaattgcaccagtcttgataggtctactggtgcataatggtascagggcatatcaatatggtccaagactctccgagacacacagatgcacatccaaatgtatgtgtctcactcacccaaagctcagcctccccctcatctcacttcctctgccctctcctccgtcctcatcttgccaagcacccatctttgagaactttctgcagagctagaggcagtggtagctgtgataaagggagaatttgccaaaaagggtcttgctgtggccacaccctaactttggcaccagtcacctcgccgctcatctctgcttcaaatattttaggtttcggaatgagccaaa

SEQ ID NO: 636 - DNA, 601 bp, Human
gtaccagtcccaaataaatagctagttcaatgccagtggaatcagcgtgcagccctgggttaaacaaaaacccttctgtagtctatgaaaggttgtcaatcaatcttcaaactctgcatccttccccaatctaccagtaactagtggggcagatgtattcattcttaaaacttgacctgtacttgcaaaatacgaagttaatttttgaatatttttcttacttcttcagtcaaagctttggttacactttgttttgttggcaactttatcccattctttaattcttctaaaatcagtgttyttttttcaatattttcttatatagccactcatgaaacttgccaataaagggtatgtttttgatgatgatgatgatgatgttatcacttacttagtgtttaccatgtgctacactgaacattttgcatacattagcttgtcaattctgtaacactctaaaaagtgggctttattaccaccatttcatggctgaggaactgaggctcaattaggttaagtaattgacccagatcacaaaatctgtaagtaaaaccaggatttgatcacgggttcatatgctttgaaagccaaagagcctagc

SEQ ID NO: 637 - DNA, 601 bp, Human
cacaacgactctgtaaggtaggggttgtcattattcctgctttcccgataaggatacagaagctcagagagggcagacatttgacctggagtagaactagggcaagaatacaggccactgtgtgccccctcctcccacgctctgtttctctctgaagatgacctggggacagcataatacaaagtggatggaatgggctgagaaaggagaggggttagattttccatttaaccatgaggaggtggtgtgtgagctgggtttggaggagaaagatttagataaaggaagaatgtgggaaagrgcacagcaggctggagaatggcgtgagccaaacaaaggagtagatgctagcagctgggtaaggcctggggtcttgcagtctctgagagcagtggccaaatggtaatgtgtgaggacaaaaagaaaaagggaaagaaggggtgtacggaggctacccagatcctccacggagccaggcactgggtatttctgaatgttcatccacaggcaatgaccccattcccagcctttctgtcccagactctctctcccaggcagaccaagaactgcagacccaatccccagaaccatagctgctggg

SEQ ID NO: 638 - DNA, 601 bp, Human
catatagaaggcgctcagtaaatactgaatgaatgaatgaagcactaaactgaatgcatataaggcaaagacacaaataacttaattttgtgcagccaaatcagtttgtaacttcaccaaacagttcacatcaacatttaatgagcgtccctttgcccaaggcactgggtgaaggatgagggggtattggtttgtgtttatgtagaattttgcagtttgcaaagtcccttctcttacatctcttcatgagggtttcacaacgactctgtaaggtaggggttgtcattattcctgctttccygataaggatacagaagctcagagagggcagacatttgacctggagtagaactagggcaagaatacaggccactgtgtgccccctcctcccacgctctgtttctctctgaagatgacctggggacagcataatacaaagtggatggaatgggctgagaaaggagaggggttagattttccatttaaccatgaggaggtggtgtgtgagctgggtttggaggagaaagatttagataaaggaagaatgtgggaaagagcacagcaggctggagaatggcgtgagccaaacaaaggagtagat

SEQ ID NO: 639 - DNA, 601 bp, Human
ttattttcagagtatggcaaagtaaaagaaaaaatgtgagatggttttaaaaattcgtcagttccacgtaattgtttgaatgtctctactgcgccaggcaaagacagaaaatgcaaatgcacactgagacctgccatatagaaggcgctcagtaaatactgaatgaatgaatgaagcactaaactgaatgcatataaggcaaagacacaaataacttaattttgtgcagccaaatcagtttgtaacttcaccaaacagttcacatcaacatttaatgagcgtccctttgcccaaggcactgggtgaaggatgagggggtattggtttgtgtttatgtagaattttgcagtttgcaaagtcccttctcttacatctcttcatgagggtttcacaacgactctgtaaggtaggggttgtcattattcctgctttcccgataaggatacagaagctcagagagggcagacatttgacctggagtagaactagggcaagaatacaggccactgtgtgccccctcctcccacgctctgtttctctctgaagatgacctggggacagcataatacaaagtggatggaatgggctgagaaaggagagg

SEQ ID NO: 640 - DNA, 601 bp, Human
gagaaaagaagtgaggccgggcgcagtggctcacgcctgtaatcccagcactttgggaggccgaggtgggtggatcacgaggtcaggagatccagaccatcctggctaacaaggtgaaaccctgtctctactaaaaatacaaaaaattagccgggtgtggtggggggcacctgtagtcccagctactcgagaggctgaggcaggagaatggcatgaacccggaaggcggagcttgcagtgagcggagaccgtgccactgcactccagcctgggcgacagagcgagactccacctcaaaaamcaaaaaaaaaaaaaaaaaaaaaaaaaaagaaagaaagaaaagaaaaggagaaagatttaactagcacattaaatccatgacttaagagctattattttcagagtatggcaaagtaaaagaaaaaatgtgagatggttttaaaaattcgtcagttccacgtaattgtttgaatgtctctactgcgccaggcaaagacagaaaatgcaaatgcacactgagacctgccatatagaaggcgctcagtaaatactgaatgaatgaatgaagcactaaactgaatgcatataaggcaaagacaca

SEQ ID NO: 641 - DNA, 601 bp, Human
ggcaaggaaagaaagaaagaaagagagagagagagagagggagggagggaggggagggaaggagaaaagaagtgaggccgggcgcagtggctcacgcctgtaatcccagcactttgggaggccgaggtgggtggatcacgaggtcaggagatccagaccatcctggctaacaaggtgaaaccctgtctctactaaaaatacaaaaaattagccgggtgtggtggggggcacctgtagtcccagctactcgagaggctgaggcaggagaatggcatgaacccggaaggcggagcttgcagtsagcggagaccgtgccactgcactccagcctgggcgacagagcgagactccacctcaaaaaacaaaaaaaaaaaaaaaaaaaaaaaaaaagaaagaaagaaaagaaaaggagaaagatttaactagcacattaaatccatgacttaagagctattattttcagagtatggcaaagtaaaagaaaaaatgtgagatggttttaaaaattcgtcagttccacgtaattgtttgaatgtctctactgcgccaggcaaagacagaaaatgcaaatgcacactgagacctgccatatagaaggcgc

SEQ ID NO: 642 - DNA, 601 bp, Human
cccaggcggcgtgctcgagcccgggtcctgcccccatccctggcagggcccggcgccccgctctcagaccagcgggtccccacgcggtgctgtgggacctgacacgctatccctccgcagacgcagctggggtacagccttgaggacgtgcatgtcatcggccacagcctgggcgcgcacacggccgcggaggcgggcaggaggctggggggccgcgtgggcaggatcacaggtaggggtcgcggggccccgggccggagtcccaggcccccgggtgcgcacctcggaagcctcggccagygcctttccgacggcgaagggcgcccctgatggtcctcctggggacccgattttttgtgatgaccggccttaaatttaaaaataattttccataatgtgtattagaaaatagataattaaaaataaaaatgcattcattttttaaaacaaaggctgggccactggctcacacctgtaatcccagcacttttgtaggctgaggcgagagaatcgcttgaggccaggagttcaagaccagtttggcaacatggtgaaaccttgtctctataaaaaatttttaaagttggccaggggtgatggc

SEQ ID NO: 643 - DNA, 601 bp, Human
agggacgaggaaagggagctgggggtggggcagtcccgggaggcaggccgtgtgcctcgcccgcccaggtggcctgcagttggcatggtggccgctggtcagcactgttgccccgcgcacgagccggcctgcgggactcgcaggctgcaaatagggagcggggtcgtcctaccccaggcggcgtgctcgagcccgggtcctgcccccatccctggcagggcccggcgccccgctctcagaccagcgggtccccacgcggtgctgtgggacctgacacgctatccctccgcagacgcagctrgggtacagccttgaggacgtgcatgtcatcggccacagcctgggcgcgcacacggccgcggaggcgggcaggaggctggggggccgcgtgggcaggatcacaggtaggggtcgcggggccccgggccggagtcccaggcccccgggtgcgcacctcggaagcctcggccagtgcctttccgacggcgaagggcgcccctgatggtcctcctggggacccgattttttgtgatgaccggccttaaatttaaaaataattttccataatgtgtattagaaaatagataattaaaaataaaaa

SEQ ID NO: 644 - DNA, 601 bp, Human
gaaatgtggctggtgcaaacgaggagctgaatttgacatgttattgagtagtagtagtctgctcacacctgatttagtaagtggtctttttaacctggttgtgttcctaacgatgtgtgagacctcagacacgtcactcacccattccagggttcagtttccatatctgttaagcgggtactagcatgtccagtccatagcactgcagtgagggtgacgttatggcaggtataagaacatcaaagctctggcatgggctaggtgtttgacagacgtgaatgcctatctctggggtgtgcamctgggggctgtttataaattgatttctctcccttgtttgtcttccccagaaaatgtttgaagtggagaaggtgaactgcatctgtgtggactggaggcacgggtcccgggcaatgtacacccaagccgtgcaaaacattcgggttgttggggcggagacagctttcttaatacaagcactgtcggtaaaaccctgcctgggccctgtcctgtgggtaggggtcagagaggggcagggaggtaccacgtggcatggagaggcagcctggggacccgtgggcatgggtaggggccggcagct

SEQ ID NO: 645 - DNA, 601 bp, Human
agacaaggcggaggacagctggccatcggacatgtgcaaggtagggccctaccacttggccactccctggtgagaccagcacccaacacacagattcaaacactgtacccccagtttcccttagactgggaaaagaaatacttcagagagagatgggtcctttttaaaaccaccgaggaaagcccagttccaaagggcatccattaccaagctctctctacctaccaatttctagccaacaatctcctatgaggctgaagacacccagagttcagtcaaaaagtctcgaggtggagactgmagcaaactgctgggcatttatccctgaggacttatgtaaaacccctttgtgatgttaaaaacacttaaattttaccctctaaagcaccgctatccaatagaatgttctgcagtgatgaaggtgttctatatatgcactgtccaaatcagaagccactggccacataagttattcagcacttgaaatgtggctggtgcaaacgaggagctgaatttgacatgttattgagtagtagtagtctgctcacacctgatttagtaagtggtctttttaacctggttgtgttcctaacgatgtgtg

SEQ ID NO: 646 - DNA, 601 bp, Human
acgaattatattgaaaaataattaccaaaacatttaaatatataaatatgtgatatagtcatatatgtgctttttatatatcattaaataacaagatctaggggttggtctaataactactataatttaaaatattaatgagtataaatgatatttttagatatctgcaataattacattatgacctgaaaatacctgtgacttctaccggggacagagtcacaggtgttgctaataccactgtggtttattgtctagttttgtgattaactgaaatgctagatatggattaaggattaaytaaaatagaaagtctgtgaatttggactttctgaaatctatccacaaccccaggtcaggagctccttctagtctgacccagctttgtgggcattgaagctgtgatatcaattctgaaactggctctaatagactcgtggcttggaaagggcaacattcaaattaatctttttaaattaaaccagctaatcactggcacggaaccagacaccattgaggcttcaaacttccaactggaccgcaagacacgcttcatcatccatggcttcttagacaaggcggaggacagctggccatcgga

SEQ ID NO: 647 - DNA, 601 bp, Human
cctgagtagctgggactacaggtgtctaccaccacacccagctaattttagtagagacggggtttcaccgtgttagccaggatggtttcgatctcctgaccttgtgatccgcctgcctcagcctcccaaagtgctggtattacaggcgtgagccaccgtgcccggccaggtcaatgtttttaaatgcagaaataaaatatattggattacaaaagaaacgaattatattgaaaaataattaccaaaacatttaaatatataaatatgtgatatagtcatatatgtgctttttatatatcaytaaataacaagatctaggggttggtctaataactactataatttaaaatattaatgagtataaatgatatttttagatatctgcaataattacattatgacctgaaaatacctgtgacttctaccggggacagagtcacaggtgttgctaataccactgtggtttattgtctagttttgtgattaactgaaatgctagatatggattaaggattaactaaaatagaaagtctgtgaatttggactttctgaaatctatccacaaccccaggtcaggagctccttctagtctgacccagct

SEQ ID NO: 648 - DNA, 601 bp, Human
accttttctgtgccaggaacctctctggccacctggaagaagcctaaaggccccttcttaggtcaattttttgttgttgttgttttttgttggtttgtttgttttttttgagacagagtcttgctctgtcacccaggctggagtgcagtggcgcgatctcggctcactgcaagctctgccttctgggttcatgccattctcccgcctcagcctcctgagtagctgggactacaggtgtctaccaccacacccagctaattttagtagagacggggtttcaccgtgttagccaggatggttycgatctcctgaccttgtgatccgcctgcctcagcctcccaaagtgctggtattacaggcgtgagccaccgtgcccggccaggtcaatgtttttaaatgcagaaataaaatatattggattacaaaagaaacgaattatattgaaaaataattaccaaaacatttaaatatataaatatgtgatatagtcatatatgtgctttttatatatcattaaataacaagatctaggggttggtctaataactactataatttaaaatattaatgagtataaatgatatttttagatatctgcaat

SEQ ID NO: 649 - DNA, 601 bp, Human
caccttttctgtgccaggaacctctctggccacctggaagaagcctaaaggccccttcttaggtcaattttttgttgttgttgttttttgttggtttgtttgttttttttgagacagagtcttgctctgtcacccaggctggagtgcagtggcgcgatctcggctcactgcaagctctgccttctgggttcatgccattctcccgcctcagcctcctgagtagctgggactacaggtgtctaccaccacacccagctaattttagtagagacggggtttcaccgtgttagccaggatggtytcgatctcctgaccttgtgatccgcctgcctcagcctcccaaagtgctggtattacaggcgtgagccaccgtgcccggccaggtcaatgtttttaaatgcagaaataaaatatattggattacaaaagaaacgaattatattgaaaaataattaccaaaacatttaaatatataaatatgtgatatagtcatatatgtgctttttatatatcattaaataacaagatctaggggttggtctaataactactataatttaaaatattaatgagtataaatgatatttttagatatctgcaa

SEQ ID NO: 650 - DNA, 601 bp, Human
gtggcatcttctggcatctcatctgtagaggttggtggcatcttctggcgtctcatctgtaggggttggtagaagggggtcgagcagcctgtggcaatttagaagtgcattccaaagtctcacagctccactgaactgaatttgctcccacacttaagcttctggtccaggggttcctcaccttttctgtgccaggaacctctctggccacctggaagaagcctaaaggccccttcttaggtcaattttttgttgttgttgttttttgttggtttgtttgttttttttgagacagagtctygctctgtcacccaggctggagtgcagtggcgcgatctcggctcactgcaagctctgccttctgggttcatgccattctcccgcctcagcctcctgagtagctgggactacaggtgtctaccaccacacccagctaattttagtagagacggggtttcaccgtgttagccaggatggtttcgatctcctgaccttgtgatccgcctgcctcagcctcccaaagtgctggtattacaggcgtgagccaccgtgcccggccaggtcaatgtttttaaatgcagaaataaaatatattggatta

SEQ ID NO: 651 - DNA, 601 bp, Human
gcattgggggtgggggtgggtgtgaattcttcctgaagagctaggagacaggtaggggagaggggacatgtagccacaatagataaaagatgaggtcctctggagcaacctccagttttcagcaggtctgcccatcagaagcagatcagacttgctccagagtgtcagaagtgaccaggagacagtttcaagaaagacattgctgagaatccagcagctcacagctctggtccctgacagagtttagggagccaggtgtctgtcaataggtttctgaggtcacccactgtgggactctatstgacagaccagccttcttagtgcccccagcccagagtcggcttggacatggttacggtgcgtctcatctgtaggggttggtggcatcttctggcatctcatctgtagaggttggtggcatcttctggcgtctcatctgtaggggttggtagaagggggtcgagcagcctgtggcaatttagaagtgcattccaaagtctcacagctccactgaactgaatttgctcccacacttaagcttctggtccaggggttcctcaccttttctgtgccaggaacctctctggccacctggaagaag

SEQ ID NO: 652 - DNA, 601 bp, Human
ttgggcattgggggtgggggtgggtgtgaattcttcctgaagagctaggagacaggtaggggagaggggacatgtagccacaatagataaaagatgaggtcctctggagcaacctccagttttcagcaggtctgcccatcagaagcagatcagacttgctccagagtgtcagaagtgaccaggagacagtttcaagaaagacattgctgagaatccagcagctcacagctctggtccctgacagagtttagggagccaggtgtctgtcaataggtttctgaggtcacccactgtgggactstatctgacagaccagccttcttagtgcccccagcccagagtcggcttggacatggttacggtgcgtctcatctgtaggggttggtggcatcttctggcatctcatctgtagaggttggtggcatcttctggcgtctcatctgtaggggttggtagaagggggtcgagcagcctgtggcaatttagaagtgcattccaaagtctcacagctccactgaactgaatttgctcccacacttaagcttctggtccaggggttcctcaccttttctgtgccaggaacctctctggccacctggaa

SEQ ID NO: 653 - DNA, 601 bp, Human
gacgttgcttctttccagaagttcacacatgtcctgtttgtggctcaccctaggaaaagaggtctgctacggacaacttggctgcttttctgatgaaaaaccatgggcaggaacccttcagcgacctgtaaaattacttccctggtcccccgaggacattgacacccgctttcttctgtacacaaatgaaaatccaaacaacttccaagtaagagcaggcatgtaagcgctgcatggtgggtgtatttgggccgccacagtggagtctttgcatggctgtctagggcataagtcactgccytggaattttccagaaactccaaggcatagaatccaaggcgtagctctcaggatcataaacacctgagtatctgatgaaatctactgatgcctaacccagaaacttacacattcacacacactggtgcagagaacttcaggggctaccccagcgtaaatgccttgttccctgggaggaagggactatgagcagcatttatggagaagcccaggcctggtgtagccaccggaaagtctgcctcgtttctacacaggagagtggagggggagaagcctcttgggcattgggggtgggggtggg

SEQ ID NO: 654 - DNA, 601 bp, Human
aagcataagagaaaggacccattataatcctttgggttggaattatgtcacccgtagtgaccatatcctgtgatcatgtttatgtcatggacacagaaagtactctcagacttagatgtggttacttggatcatggattacatgtattgagtctctactacacgtagtgtgatacacaagtcattcctgttcttaagaaacttactttttcaaagagcaaaagagaaaatatgaaacggcagagaatcaccctttcaaaaaaatgtgcataaaaggatgacatgaagacatgtgaattggygtgggcacggcctatgctgtgtgtaatagagatgtcaagacaaagtagcaactctgtgctacagagtttgtaggcactcgataaatactcactatttgatgcttacatgtaaagagtcagctgcaagtttcctgaaagaggtggttttaaggcagcagtttgtattaggttggtgcaaaagtaactgtggtttttaccattgaaagtaatggcaaaaaccgcaattattttgcaccaacctatgcatcagcaattccccaatttgcctaatggtaaggggcacttactgaatatgtgttt

SEQ ID NO: 655 - DNA, 601 bp, Human
actaacatggtatctggcacatagtaaacaaatataaactattatgcatttttttaatgattcaccaatatttggcatcatcagtacaggagttgaggaagcataagagaaaggacccattataatcctttgggttggaattatgtcacccgtagtgaccatatcctgtgatcatgtttatgtcatggacacagaaagtactctcagacttagatgtggttacttggatcatggattacatgtattgagtctctactacacgtagtgtgatacacaagtcattcctgttcttaagaaactyactttttcaaagagcaaaagagaaaatatgaaacggcagagaatcaccctttcaaaaaaatgtgcataaaaggatgacatgaagacatgtgaattggtgtgggcacggcctatgctgtgtgtaatagagatgtcaagacaaagtagcaactctgtgctacagagtttgtaggcactcgataaatactcactatttgatgcttacatgtaaagagtcagctgcaagtttcctgaaagaggtggttttaaggcagcagtttgtattaggttggtgcaaaagtaactgtggtttttaccattg

SEQ ID NO: 656 - DNA, 601 bp, Human
tttatctttgtgtcccctcaagttctagctttattcccagttaaacttcttgggttcaaatcctgcctccaccactagctgtgacctcaggtagcttaccttgtctctctgtgccttggtttcctcagcagtaaaatggagataatactaattccatatttgtgttttcaggcttaaatgatactataccagtaaagtactaacatggtatctggcacatagtaaacaaatataaactattatgcatttttttaatgattcaccaatatttggcatcatcagtacaggagttgaggaagcrtaagagaaaggacccattataatcctttgggttggaattatgtcacccgtagtgaccatatcctgtgatcatgtttatgtcatggacacagaaagtactctcagacttagatgtggttacttggatcatggattacatgtattgagtctctactacacgtagtgtgatacacaagtcattcctgttcttaagaaacttactttttcaaagagcaaaagagaaaatatgaaacggcagagaatcaccctttcaaaaaaatgtgcataaaaggatgacatgaagacatgtgaattggtgtgg

SEQ ID NO: 657 - DNA, 601 bp, Human
ctgcctacgccttcacaggcgtgcttcctccgggagtctttccctctccgtgggggctgcctcacctcctctcctgccagaatacctcactgcccaatttggtcccccaagtcctgctgtaggagacatggtctccttgggtccctgtgggggctttcttctgccttgtgactcttcccccttgtcttctcaaccccgccagcccactcttggcctctccttccatcctggccatgaattaaggccaggctcctgacggcagagaccggggtgggtgcgactgctcctccggccatacaayccctcttcatctcctttgctgacctgcagcctcctcctgccccaaatgtggacattccccaaggctcacgccaggctctctcctcatctctctcctcctagggccttccttcttgcccagcttcctggtcttcccgagttgcaagaagccctatcagggccaagcctcaagcctcaagcctcactctcacttccctgcccccagccttctcaggcttttctgcttctcagccccctgtactcgagtcccaaaaacacaggactgcctgtggaagcacagcattgccactgccaccaccac

SEQ ID NO: 658 - DNA, 601 bp, Human
ctgccaggcaagcctgcctttctgccatcaagcccacgtgtcctcttctcagagtcaccgtttctgtctctccagtttgttcccccgacctggttctgtccagaggagatacagatattcaagttctacttatcctaaaacacaaatcacctccgtttcttttggagccccctgagccccagcctgctgacttcccatctgcctacgccttcacaggcgtgcttcctccgggagtctttccctctccgtgggggctgcctcacctcctctcctgccagaatacctcactgcccaatttggycccccaagtcctgctgtaggagacatggtctccttgggtccctgtgggggctttcttctgccttgtgactcttcccccttgtcttctcaaccccgccagcccactcttggcctctccttccatcctggccatgaattaaggccaggctcctgacggcagagaccggggtgggtgcgactgctcctccggccatacaacccctcttcatctcctttgctgacctgcagcctcctcctgccccaaatgtggacattccccaaggctcacgccaggctctctcctcatctctctcctcctagg

SEQ ID NO: 659 - DNA, 601 bp, Human
ggagggtgtggtgttcccacctgatcccaatgcccttgtccttgcctgcagaccaaagtcatgtggatgtgccctctcccaagaaagcccagtcctgccaggcaagcctgcctttctgccatcaagcccacgtgtcctcttctcagagtcaccgtttctgtctctccagtttgttcccccgacctggttctgtccagaggagatacagatattcaagttctacttatcctaaaacacaaatcacctccgtttcttttggagccccctgagccccagcctgctgacttcccatctgcctacrccttcacaggcgtgcttcctccgggagtctttccctctccgtgggggctgcctcacctcctctcctgccagaatacctcactgcccaatttggtcccccaagtcctgctgtaggagacatggtctccttgggtccctgtgggggctttcttctgccttgtgactcttcccccttgtcttctcaaccccgccagcccactcttggcctctccttccatcctggccatgaattaaggccaggctcctgacggcagagaccggggtgggtgcgactgctcctccggccatacaacccctcttc

SEQ ID NO: 660 - DNA, 601 bp, Human
taatgattatgaagagcattatcgttacttggagaaaacaattgtgccactcagagagtgttgactctcaggcagacacagggcaacgtgccggacacagagtatctcccgtaaccctcctacttggccaccttcttcctgcaaagactctcacggctgggagacaagtggagggtgtggtgttcccacctgatcccaatgcccttgtccttgcctgcagaccaaagtcatgtggatgtgccctctcccaagaaagcccagtcctgccaggcaagcctgcctttctgccatcaagcccacrtgtcctcttctcagagtcaccgtttctgtctctccagtttgttcccccgacctggttctgtccagaggagatacagatattcaagttctacttatcctaaaacacaaatcacctccgtttcttttggagccccctgagccccagcctgctgacttcccatctgcctacgccttcacaggcgtgcttcctccgggagtctttccctctccgtgggggctgcctcacctcctctcctgccagaatacctcactgcccaatttggtcccccaagtcctgctgtaggagacatggtctccttgg

SEQ ID NO: 661 - DNA, 601 bp, Human
caggagcctgccttccacacatacattaataacaccaaccagtaatgtcaaaaggaaaaattacaaacccagaaaattaaagtcattctgcacttgcccttggtttaacaggcatttcactcttggcacctttcctgtcctatcattaataagcatcttattgatacagtttatactccaaattctccaggcttgtgaaagtttcctcaggattgcttgaaaatgaaagtcctggccaggtgcgcagtggctcatgcctgtaatcccagcactttgagaggccgaggcgggtggatcaccygaggtcaggagttcaagaccagcgtagccaacatggtgaaaccctgtctctactaaaagtacaaaaattagccaggtgtggtcgcaggcgcctgtagtcctagctactcaggaggctgaggcaggagaattgcttaaattcggaggcagaggttgcagtgagctgagatcgcgccactgcactccagcctgggcgacagaatgaggctgtctcaaaaaaaaaaaaaaaaaagaaagaaaaaaagaaaagaaaagaaaagtcctgaggagaaaactcccactatctctgtgcatgtgatca

SEQ ID NO: 662 - DNA, 601 bp, Human
tccaaattctccaggcttgtgaaagtttcctcaggattgcttgaaaatgaaagtcctggccaggtgcgcagtggctcatgcctgtaatcccagcactttgagaggccgaggcgggtggatcacccgaggtcaggagttcaagaccagcgtagccaacatggtgaaaccctgtctctactaaaagtacaaaaattagccaggtgtggtcgcaggcgcctgtagtcctagctactcaggaggctgaggcaggagaattgcttaaattcggaggcagaggttgcagtgagctgagatcgcgccwctgcactccagcctgggcgacagaatgaggctgtctcaaaaaaaaaaaaaaaaaagaaagaaaaaaagaaaagaaaagaaaagtcctgaggagaaaactcccactatctctgtgcatgtgatcacacatattagtatactatatgtggaatgattccaagtgcattttaaatttatagtaccattttaaattcaagctggtaatatgtactgcctggcagaactcctaaagatatatcagctcctttgacatccaggaagacattttccttccagaattcttcaatctcttttaaatcag

SEQ ID NO: 663 - DNA, 601 bp, Human
cagcactttgagaggccgaggcgggtggatcacccgaggtcaggagttcaagaccagcgtagccaacatggtgaaaccctgtctctactaaaagtacaaaaattagccaggtgtggtcgcaggcgcctgtagtcctagctactcaggaggctgaggcaggagaattgcttaaattcggaggcagaggttgcagtgagctgagatcgcgccactgcactccagcctgggcgacagaatgaggctgtctcaaaaaaaaaaaaaaaaaagaaagaaaaaaagaaaagaaaagaaaagtcctgargagaaaactcccactatctctgtgcatgtgatcacacatattagtatactatatgtggaatgattccaagtgcattttaaatttatagtaccattttaaattcaagctggtaatatgtactgcctggcagaactcctaaagatatatcagctcctttgacatccaggaagacattttccttccagaattcttcaatctcttttaaatcagtacagttctatttttcaaatatctacatgtgtctactccatgaagtactgtgtcatcgtgactataaaaatagtgaaacttctctctcac

SEQ ID NO: 664 - DNA, 601 bp, Human
atcaaggagcttgcagtgaaaacttgcaatgccagtagagtgcgatctattagtgggttctgatggggagagtaggagctttacaggaacacatagaaggcagctaatccacactgatggggtggggaaagggcttaaggaggtctcccaaggaagagacgtctaaattgacagctgaaggctagtctgttgatgttagctggcaagtgcttgggggatagacaacaacaagaagagaagaacaaaccaggcccagaggtgagaggctatgatgtattcgagggtctgaaagttcaacaargggtttggctgaagagtctagaaaaatagatgatgagttaggaaagctcggaggccttcagaatgagtttgggcttgatcctgaaggcaatgagaggcatggaaggttttcagcagaggagtaatatccattaggctggcattttagaaaaaccacagcaaaaaatgtcctgaaaatacaatcttccctctccagacagagtatagctaccccccttccaaagttcacctcattggccacagcctgggagcccacgtggctggagaggcaggaagcaagactccaggcctgagcaggatt

SEQ ID NO: 665 - DNA, 601 bp, Human
aattgacagctgaaggctagtctgttgatgttagctggcaagtgcttgggggatagacaacaacaagaagagaagaacaaaccaggcccagaggtgagaggctatgatgtattcgagggtctgaaagttcaacaaagggtttggctgaagagtctagaaaaatagatgatgagttaggaaagctcggaggccttcagaatgagtttgggcttgatcctgaaggcaatgagaggcatggaaggttttcagcagaggagtaatatccattaggctggcattttagaaaaaccacagcaaaaawtgtcctgaaaatacaatcttccctctccagacagagtatagctaccccccttccaaagttcacctcattggccacagcctgggagcccacgtggctggagaggcaggaagcaagactccaggcctgagcaggattacaggtaaggccccagaggcagggccccagttttgtccccagaaaccccagaatgaggtctcaagaatgcagcccagttcagagctcccctgaaggagactgtcccccttggctgtgatagagctgcttggagcctgcacagaacattttagggagcccccaaga

SEQ ID NO: 666 - DNA, 601 bp, Human
gaagagaagaacaaaccaggcccagaggtgagaggctatgatgtattcgagggtctgaaagttcaacaaagggtttggctgaagagtctagaaaaatagatgatgagttaggaaagctcggaggccttcagaatgagtttgggcttgatcctgaaggcaatgagaggcatggaaggttttcagcagaggagtaatatccattaggctggcattttagaaaaaccacagcaaaaaatgtcctgaaaatacaatcttccctctccagacagagtatagctaccccccttccaaagttcacctsattggccacagcctgggagcccacgtggctggagaggcaggaagcaagactccaggcctgagcaggattacaggtaaggccccagaggcagggccccagttttgtccccagaaaccccagaatgaggtctcaagaatgcagcccagttcagagctcccctgaaggagactgtcccccttggctgtgatagagctgcttggagcctgcacagaacattttagggagcccccaagaagctcatgcgccaccttcacggcaagggaagggtgattttgttcctctttgcttcttccacctctg

SEQ ID NO: 667 - DNA, 601 bp, Human
tttattttcagctggcaactacattcacgttcctattttatcagctgctgtaatgaagccttcaaaaactattaacaaatccaagatccctactaagaaggaaatttgtcaaaaacaataattattaatatcttacttatacacccatgactatacaccaggcattgtgctaagtgctacctattaactcatttaatctataacaaccatatcaaatagatgccattatcaccccattttgtaaaatgaagaacctgaagcacaaaaaggtagagtgacatgctcaaggtcatgcatcttkccccaaaagcagctgagtaggaatttggagccaggcaacctagacccagaacctgtgttcttaactatgataccacattgcttcacccctttctttctacaagcttggggagagaaaggatgatgaagaagaaagatacacaagtaaatgggagactctggtgtggaaaaaatccttgcttaaacaaaatctaaatttctttgctcatttgtcctcctccatccacgccactgggaacccttttgcaatgagccacattcagactctatgtcctcatatttagcacccaaggccatggca

SEQ ID NO: 668 - DNA, 601 bp, Human
tatcaccccattttgtaaaatgaagaacctgaagcacaaaaaggtagagtgacatgctcaaggtcatgcatcttgccccaaaagcagctgagtaggaatttggagccaggcaacctagacccagaacctgtgttcttaactatgataccacattgcttcacccctttctttctacaagcttggggagagaaaggatgatgaagaagaaagatacacaagtaaatgggagactctggtgtggaaaaaatccttgcttaaacaaaatctaaatttctttgctcatttgtcctcctccatccaygccactgggaacccttttgcaatgagccacattcagactctatgtcctcatatttagcacccaaggccatggcactgcatcactctggtgcatggtacccattgagttgggcagtgcatagcccgggcagctgtacaccttggtgctgctgacatctacagtcaggtctattgttctgcagtgctgatcatctcttttagggttggatcctgtagaagcaagtttcgagagtactcctgaagaggtgcgacttgatccctctgatgctgactttgttgatgtgattcacacggatgcagc

SEQ ID NO: 669 - DNA, 601 bp, Human
tggcaccacacggagaaaacccttagtagtctgaccaaatgtaatgagtaaagatttttactgaatttcatcaaaatggcttggcatatatggatgccatcaaagcaaatattaagaatgaggacaggccagctgtggtggctcacgcctataatcccagcactttgggaggccgaggcgggcaaatcacttgaggtcaggagtttgagaccagcttggccaacatggtaaaaccccgtctctactaaaaatacaaaaagtagccagtcgtggtggtgtgtggctgcaattccagctgctygagaggctgagtcaggagaatcgcttgaacccaggaggcaaaggttgcagtgagccgagaccatgccattgcaccacagcctgggcaacaagagcgaaactccatctcgaaaataaaataaaataaaataaaataaaataaaataaaataaaaaataaagaatgaggacatatgcagtttgtctttcacagcctcatgagggtttgcgtgcatagggcagtcaaaactcttcatcagtaatggcccagcaagctcaggccaggtctagaaggtataatgtaacatttgtcacttggcagg

SEQ ID NO: 670 - DNA, 601 bp, Human
tgtccagatcaaggatgcccacagatgggtcactatgctgataaatttgctggcaggacaagtgaagagcagcagaaattcttcttgaacacaggagaggctagcaatttcgctcgtaagttgcactttgactacctgcccatgtaaagaaagtatatagtttctgttacaaatgaggggcttgctttcaacctgaaatatttgtgggtacattttaattatcttagaaatggacacatttaccgaaactattgcagttacaagtaaactgaggatttagacagagtgtgcatttcttccrttctatttctgcggcatgaaatgagagcaagcaactagtataattaatgggatgaggccagtttgcacatccttgtgaccagctaccctgaatttttaccactccacagttcattgtttctttcctttttaaggccgcatcagacacacctgttctcttcattcagcaaagacgtaattggtaccagctctttgctgggctatgtcccttaagaagcccaactccattctctgctttcccctctgtctgtgcatccctgatgcccaggggctgcctcgctggtggagtgcaggcaggaat

SEQ ID NO: 671 - DNA, 601 bp, Human
agaggctagcaatttcgctcgtaagttgcactttgactacctgcccatgtaaagaaagtatatagtttctgttacaaatgaggggcttgctttcaacctgaaatatttgtgggtacattttaattatcttagaaatggacacatttaccgaaactattgcagttacaagtaaactgaggatttagacagagtgtgcatttcttccgttctatttctgcggcatgaaatgagagcaagcaactagtataattaatgggatgaggccagtttgcacatccttgtgaccagctaccctgaattyttaccactccacagttcattgtttctttcctttttaaggccgcatcagacacacctgttctcttcattcagcaaagacgtaattggtaccagctctttgctgggctatgtcccttaagaagcccaactccattctctgctttcccctctgtctgtgcatccctgatgcccaggggctgcctcgctggtggagtgcaggcaggaatcagggggaaggatgatttctctccaaaacctgctgaatggactaagacacagggtagagactgggcatgtttgggccactttgtaccaacctgcc

SEQ ID NO: 672 - DNA, 601 bp, Human
cttccgttctatttctgcggcatgaaatgagagcaagcaactagtataattaatgggatgaggccagtttgcacatccttgtgaccagctaccctgaatttttaccactccacagttcattgtttctttcctttttaaggccgcatcagacacacctgttctcttcattcagcaaagacgtaattggtaccagctctttgctgggctatgtcccttaagaagcccaactccattctctgctttcccctctgtctgtgcatccctgatgcccaggggctgcctcgctggtggagtgcaggcrggaatcagggggaaggatgatttctctccaaaacctgctgaatggactaagacacagggtagagactgggcatgtttgggccactttgtaccaacctgccccatgacagttccataggaggtgacccagtaaagacagaggttacatattcatataaatgtataacacatcttacatagtttttaaagtcagatttattgaggtataatttatatttggcaaaatgcacgctgtttagcatacacttgtatgagtttggacaaatgaatagttgtgtaaacacctccaaatcaagataca

SEQ ID NO: 673 - DNA, 601 bp, Human
gacgtaattggtaccagctctttgctgggctatgtcccttaagaagcccaactccattctctgctttcccctctgtctgtgcatccctgatgcccaggggctgcctcgctggtggagtgcaggcaggaatcagggggaaggatgatttctctccaaaacctgctgaatggactaagacacagggtagagactgggcatgtttgggccactttgtaccaacctgccccatgacagttccataggaggtgacccagtaaagacagaggttacatattcatataaatgtataacacatcttacrtagtttttaaagtcagatttattgaggtataatttatatttggcaaaatgcacgctgtttagcatacacttgtatgagtttggacaaatgaatagttgtgtaaacacctccaaatcaagatacagaacacttctatcaccatatatatcactctgtaatttttttttttttttttgagacggagtctcgctctgtcgcccaggctggagtgcagtggcgcaatcttggctcactacaacctccccctcccgggttcacgccattctcctgcctcagcctcccgagtagctgggactacag

SEQ ID NO: 674 - DNA, 601 bp, Human
ctgctgaatggactaagacacagggtagagactgggcatgtttgggccactttgtaccaacctgccccatgacagttccataggaggtgacccagtaaagacagaggttacatattcatataaatgtataacacatcttacatagtttttaaagtcagatttattgaggtataatttatatttggcaaaatgcacgctgtttagcatacacttgtatgagtttggacaaatgaatagttgtgtaaacacctccaaatcaagatacagaacacttctatcaccatatatatcactctgtaatttttttttttttttttgagacggagtctcgctctgtcgcccaggctggagtgcagtggcgcaatcttggctcactacaacctccccctcccgggttcacgccattctcctgcctcagcctcccgagtagctgggactacaggcgcccgccaccatgccaggctaattttttttttacatttttagtagagacggggtttcaccatgttagccaggatggtctcgatctcctgaccttgtgatccgcctgcctcggcctcccaaagtgccgggattacaggcgtgagccaccgcgcccggc

SEQ ID NO: 675 - DNA, 601 bp, Human
agggtagagactgggcatgtttgggccactttgtaccaacctgccccatgacagttccataggaggtgacccagtaaagacagaggttacatattcatataaatgtataacacatcttacatagtttttaaagtcagatttattgaggtataatttatatttggcaaaatgcacgctgtttagcatacacttgtatgagtttggacaaatgaatagttgtgtaaacacctccaaatcaagatacagaacacttctatcaccatatatatcactctgtaatttttttttttttttttgagayggagtctcgctctgtcgcccaggctggagtgcagtggcgcaatcttggctcactacaacctccccctcccgggttcacgccattctcctgcctcagcctcccgagtagctgggactacaggcgcccgccaccatgccaggctaattttttttttacatttttagtagagacggggtttcaccatgttagccaggatggtctcgatctcctgaccttgtgatccgcctgcctcggcctcccaaagtgccgggattacaggcgtgagccaccgcgcccggcccactctgtgtattttttttg

SEQ ID NO: 676 - DNA, 601 bp, Human
ctgtaatttttttttttttttttgagacggagtctcgctctgtcgcccaggctggagtgcagtggcgcaatcttggctcactacaacctccccctcccgggttcacgccattctcctgcctcagcctcccgagtagctgggactacaggcgcccgccaccatgccaggctaattttttttttacatttttagtagagacggggtttcaccatgttagccaggatggtctcgatctcctgaccttgtgatccgcctgcctcggcctcccaaagtgccgggattacaggcgtgagccaccgcrcccggcccactctgtgtattttttttgtaagaagacattgattaatcaatccttccactgatgttgtgatgcatgaaatacttgccaatatttcaacaacaaattaaacactcaaaaaccaggtattcattcctcaatcaacatttatttatgggccacagactatgctagacactgaggatgcagggacgaacaagagactcctctcatgaaattaataatccagccaaagacagaaactgggcaagcaactacaagcgtgttgggcttggtggctgttgccatgacattatgggacag

SEQ ID NO: 677 - DNA, 601 bp, Human
ccaggctggagtgcagtggcgcaatcttggctcactacaacctccccctcccgggttcacgccattctcctgcctcagcctcccgagtagctgggactacaggcgcccgccaccatgccaggctaattttttttttacatttttagtagagacggggtttcaccatgttagccaggatggtctcgatctcctgaccttgtgatccgcctgcctcggcctcccaaagtgccgggattacaggcgtgagccaccgcgcccggcccactctgtgtattttttttgtaagaagacattgattaawcaatccttccactgatgttgtgatgcatgaaatacttgccaatatttcaacaacaaattaaacactcaaaaaccaggtattcattcctcaatcaacatttatttatgggccacagactatgctagacactgaggatgcagggacgaacaagagactcctctcatgaaattaataatccagccaaagacagaaactgggcaagcaactacaagcgtgttgggcttggtggctgttgccatgacattatgggacagagaacctggccctgaccagaaggagggtcagggtcaaggtctctga

SEQ ID NO: 678 - DNA, 601 bp, Human
ctcctctcatgaaattaataatccagccaaagacagaaactgggcaagcaactacaagcgtgttgggcttggtggctgttgccatgacattatgggacagagaacctggccctgaccagaaggagggtcagggtcaaggtctctgaagacacgaaagatgaataggagttaggcaagaatcatgtctgtgtatattaatgtacatctgtgcacatgtgtgggtgtatgaatgcatgtgtgagtgtgtttgtgtatgtacctttgtgtgtatgcatgtgtttatatacgtatgtatatgagyctgtatgtttatgtatatgtatgtgcatgtgtatgtatatttgtatgtgggtgtctatgtatgtgcgtggttatatgtgtgtaggtttgtgtgtgtgtgcacatacacatgcatgtttgtgtagatgtatttgtgtgtgtgcacatgcacatgttgtgtatatgtatttgtgtatgtgcacgcacatgcatgtttgtgtatatgtattgtgtgtgcacatgcatatgtttgtgtatatgtatttgtgtgtgtgcacgcacatgcatatgtttgtgtatatgtatttgtatttgtgtgcgt

SEQ ID NO: 679 - DNA, 601 bp, Human
tctatgtatgtgcgtggttatatgtgtgtaggtttgtgtgtgtgtgcacatacacatgcatgtttgtgtagatgtatttgtgtgtgtgcacatgcacatgttgtgtatatgtatttgtgtatgtgcacgcacatgcatgtttgtgtatatgtattgtgtgtgcacatgcatatgtttgtgtatatgtatttgtgtgtgtgcacgcacatgcatatgtttgtgtatatgtatttgtatttgtgtgcgtgtgcatgcaggccctgggacagcatttcaggtagaagcctaagtgacagctgcycgtgcacctgctctgtgctagagactgcccagggccctggggagcagagaggaaacacagtccccgccctcgaggtgcttgccaggctgcactcccgagctaccttcccaaatgtggagacaagcccctattccctctctcttcaccttaccttactgtactgccattctggggcagagctggctaacagaactttctgcaatgaggggcatattctgtgtagccattagcctcatgtggcaacttaacatttgcaacacagctaatgagtttgagaaactaaatttttaattgtattta

SEQ ID NO: 680 - DNA, 601 bp, Human
gacagcatttcaggtagaagcctaagtgacagctgctcgtgcacctgctctgtgctagagactgcccagggccctggggagcagagaggaaacacagtccccgccctcgaggtgcttgccaggctgcactcccgagctaccttcccaaatgtggagacaagcccctattccctctctcttcaccttaccttactgtactgccattctggggcagagctggctaacagaactttctgcaatgaggggcatattctgtgtagccattagcctcatgtggcaacttaacatttgcaacacagckaatgagtttgagaaactaaatttttaattgtatttaatttggatttaaatgtaagcagccacatgtggctggtgacctcctccctgggcaatgcagttctagagggggatactgctaaatacatacttctccataaggccttgtttgatttgtagattaacaaatagaatttcttatactttggctgggcgtggtggctcacgcctgtattcccatcactttgggaggcggacacgggcggatcacttgaggtcaggagttggagaccagcttgaccaacatggcgaaactctgtctcta

SEQ ID NO: 681 - DNA, 601 bp, Human
tggcagtgagccaagattgcaccactacactccagcctgggtgacagagtgagaccccatctcaaaaaataataataataattttttagaaaagaatttcttatgctttgttgcctcagagtaagagaaggagacaagtctgggatgtaggctacttattttgtgtgtgaataaattgaactcttccatctcctgtgcaggctggagatatggggtttccatcacactgtctggaagaacagccactggtcagatcaaagttgctttgtttggaaataagggaaacactcaccagtacagyatcttcaggtaatttcctattttaacactacgtctcatttgatgatatacacagccttcaaaccacacacttaatttgaacacttatcatctctttatatgtccactggtttttaattatagtcatgcaacatgtaacaacattttagttgatggaccacatacacaacagttgctttataagcttgtaataccatatttttactgtactttttctatgtttgggtgtttagatacacaaatacttaccattgtgttccagttgtctacagaactcaatacagtaacatgtagtacaggt

SEQ ID NO: 682 - DNA, 601 bp, Human
tgctttgttgcctcagagtaagagaaggagacaagtctgggatgtaggctacttattttgtgtgtgaataaattgaactcttccatctcctgtgcaggctggagatatggggtttccatcacactgtctggaagaacagccactggtcagatcaaagttgctttgtttggaaataagggaaacactcaccagtacagcatcttcaggtaatttcctattttaacactacgtctcatttgatgatatacacagccttcaaaccacacacttaatttgaacacttatcatctctttatatgtccactggtttttaattatagtcatgcaacatgtaacaacattttagttgatggaccacatacacaacagttgctttataagcttgtaataccatatttttactgtactttttctatgtttgggtgtttagatacacaaatacttaccattgtgttccagttgtctacagaactcaatacagtaacatgtagtacaggtttgtaacctaggagcaataggctgtaccatacagcctaggtatgtagtaggctgtgccatctacgtttgtgtgagtacatgctatgatgtccacacaatgatt

SEQ ID NO: 683 - DNA, 601 bp, Human
gtgttccagttgtctacagaactcaatacagtaacatgtagtacaggtttgtaacctaggagcaataggctgtaccatacagcctaggtatgtagtaggctgtgccatctacgtttgtgtgagtacatgctatgatgtccacacaatgattaaattacctaaggacacatttctcagaacatatctccattgttaagcaacgcaggactatataactttatgtactgatgttaattgcagacttctgctaataatttttcttttctgttataaacctaggcatttcgtcctttctctctcttttttttttttttttttttttttgagaaagagtctttgctctgtcacccaggctggagtgcagtggcacgatcttggctcattgcaacctccgcctcccgggttcaagaaattctcgtgcctcagcctcccaagtagctgagattacaggcatgtgccaccacacctggctgatttttgtatttttagtagagatggggggcgttttgccatgttggccaggctggtctcgaacttctgacctcaagtgatccacccatctcggcctctcaaagtgctgggattacagacgtgagccacc

SEQ ID NO: 684 - DNA, 601 bp, Human
aatattacttcagatatgctgttttctgattagtgcaataacacatgcttattgtgccatactatgtggccaatttgttactgtacaaataattcttccaaaacatataaaatgatatgcaggaattctattttattttctattagaaagctttaaggaaaaattaacttgagttttaaaaaccatagtttgaggtgctagcatatagctggcttttccatttctccatcctttatttggaaattaattcggaaaaataatcctgttaatctagaatagaaaacagcagcctggcattgtrtggtaattagaactcatttccgtgaacagggatgtttatgtttctctatttcaagggggattctcaaaccaggctcaacccattcctatgagtttgatgcaaagctggatgttggaacaattgagaaagtcaagtttctttggaataacaatgtgataaatccaaccctccccaaagtgggtgccaccaagatcactgtgcaaaagggagaagagaagacagtgtatgtatctttgctggctggtgcctaaaaatgtttgcagagattcatgttataatgaaaacccaccctagaaagtt

SEQ ID NO: 685 - DNA, 601 bp, Human
tcggaggccaccgtcctgtgtgacactccagaaccatagcagaccttgtcctagagcctccaggcagcaagcgctgtaggcgctggttgcagctccagccctagtgccccctcgtgcctcctgaatcactcatcaactgtgacctgggcttaaccccttaagaaaaaccaaaccaaaccaaaccaaaccaaaacaaaacaaaacacctggcttttgctaaggtgacccaaactcttacaaagcttccttttctccccaggtacaacttctgtagcgaagacacagtgcgggaagacacgcygctcaccctcacgccctgctaagctcccggggcgacgaggctgctgcgttcacactaataaaatccactggtgcatctgtatgctctgggtctatctcctgccgcggccgcctcccggggatacatttgggaatggaacgtttgcaaatgtcccgagcacgtccccatacctgggtttctccccgttaactttgggtcacacggtttccctggctcctgtgcgtaggtcgactgtcttctccgtgcctgagctggtggcgatggactgaactccggagcctcagctcagggataccagcc

SEQ ID NO: 686 - DNA, 601 bp, Human
atatatataaatatcttgcatctatacacaacagggcaggagtctccatgtcttcttgagcagtgagtttgcaggctcccacaggccctcttctcatggtaatagtgtggccctcagtgcaaaggagactagaacccggcagcccagactggcccttcccctctcctccctgcactccagtgctcccaactggtctcaggtaaagaaagattaatttgagtggttgggtaggaagagatgggaaggggcaaatcctaatggagcctgacccctagagtggggagatccaggccagcagaasgggtggccatagccacctcctgggatagaagctttgtagttcatagttcgattagtgtgtccttaggacataggtccagccctacagattagctgggtgaagaaggcaagtgtctcgacagggcttagtctccaccctcaggcatggaaccattcagggtgaagcctgggatgtgggcacaggagactcaggctgatataaaaataacaaaatcagtaataaaaaaattataaaacctgttgcttgtctgaatagatttgagcaacagtcttgcttttgttaaaatcctggagccgttaa

SEQ ID NO: 687 - DNA, 601 bp, Human
aatctcagctactcaggaggctgaggcaggagaatcgcttgaacccgggaggcggaggctgtggtgagctgcggtcgctccattgcactccagcctgggcaacaagagtaaaactcaatcagaaaaaaaagaaaagcctttctccctgcaaataatgcatatacaacactcaatattttagtatgtcctgcactcacgattttaaccctaataggaaggacaactggaattctttctccttagcatccacgaaccccatatgttataggacaaacagatggccagaccctggcctgtgccyccaaacacagaccttttcaaggtctaatgcttccagagaagtcttcacactggctctgagacccacacttgtaatccatacaaccaagcagcccgatcctctaaacactcaaccatctcgtcctcagtggcatatggttacctaaaataaacctgagaagcaaacacaacttctccgggtgactttcctatgataaggtgaacagaactgtatgacattcaaagagaactgatgaagcggcagcagtgcaggctagagacgaaatgaaaaggccttaagatagcttggtgacttaggaga

SEQ ID NO: 688 - DNA, 601 bp, Human
attttcctacattttctttctttctgctttgtagagatgggatctcactatattgcccaaggctagtctcaaactccaggcctcatgtgatcctcctgccttggtttcccaaatgctggggttataggtgtgacccaccacacctggccccttatttttagttaaatttatcttggtaaaaaatgcctttcttgctgcgcgcagtggctcatgcctgtaatctcagcaccttgggaggccgaggccggcggatcgcctgaggtcgggagtcgagaccagcctgaccaacatagagaaaccycgtctctactaaaaatacaaaattagccgggcccggtggttcatgcctgtaatctcagctactcaggaggctgaggcaggagaatcgcttgaacccgggaggcggaggctgtggtgagctgcggtcgctccattgcactccagcctgggcaacaagagtaaaactcaatcagaaaaaaaagaaaagcctttctccctgcaaataatgcatatacaacactcaatattttagtatgtcctgcactcacgattttaaccctaataggaaggacaactggaattctttctccttagcatccac

SEQ ID NO: 689 - DNA, 601 bp, Human
gatgtctcagtcccagctaagcatcggtaccccggagggccctgccagtgcaatgctctgttaaatctttttccgtttagtaaaaatctcttctgtctcctctcatcattcactatctttgagagccttttcttctttagtctcataattttccatccctttcttattttcctacattttctttctttctgctttgtagagatgggatctcactatattgcccaaggctagtctcaaactccaggcctcatgtgatcctcctgccttggtttcccaaatgctggggttataggtgtgacccaccacacctggccccttatttttagttaaatttatcttggtaaaaaatgcctttcttgctgcgcgcagtggctcatgcctgtaatctcagcaccttgggaggccgaggccggcggatcgcctgaggtcgggagtcgagaccagcctgaccaacatagagaaaccccgtctctactaaaaatacaaaattagccgggcccggtggttcatgcctgtaatctcagctactcaggaggctgaggcaggagaatcgcttgaacccgggaggcggaggctgtggtgagctgcggtcgctccattg

SEQ ID NO: 690 - DNA, 601 bp, Human
cttaaactcctttcctttcaggtcgggcagattaggcagcaggctgggagcttcagcaggagaagtgaccttgcctgcagcctcccagatgtctcagtcccagctaagcatcggtaccccggagggccctgccagtgcaatgctctgttaaatctttttccgtttagtaaaaatctcttctgtctcctctcatcattcactatctttgagagccttttcttctttagtctcataattttccatccctttcttattttcctacattttctttctttctgctttgtagagatgggatctcacyatattgcccaaggctagtctcaaactccaggcctcatgtgatcctcctgccttggtttcccaaatgctggggttataggtgtgacccaccacacctggccccttatttttagttaaatttatcttggtaaaaaatgcctttcttgctgcgcgcagtggctcatgcctgtaatctcagcaccttgggaggccgaggccggcggatcgcctgaggtcgggagtcgagaccagcctgaccaacatagagaaaccccgtctctactaaaaatacaaaattagccgggcccggtggttcatgcct

SEQ ID NO: 691 - DNA, 601 bp, Human
cgcaggggaagaaagtacttactctgaacccaacatataagggcgaacccaacatataagagacatttcttagtggggagaaccggtcatcttcaccttgcctggaataattcagccgggcgagacattttccatttctaccttggggcagctcaatttttatacctgaggccaacttctacgccattcccccccaccccaccacccaaaatcccttcaacctttcatatcttaaactcctttcctttcaggtcgggcagattaggcagcaggctgggagcttcagcaggagaagtgaccytgcctgcagcctcccagatgtctcagtcccagctaagcatcggtaccccggagggccctgccagtgcaatgctctgttaaatctttttccgtttagtaaaaatctcttctgtctcctctcatcattcactatctttgagagccttttcttctttagtctcataattttccatccctttcttattttcctacattttctttctttctgctttgtagagatgggatctcactatattgcccaaggctagtctcaaactccaggcctcatgtgatcctcctgccttggtttcccaaatgctgg

SEQ ID NO: 692 - DNA, 601 bp, Human
ctggaaacaaatacagtgcagtctgatctgtaccccagactccacggaagcccagtggtggtggtggagggggtggtagtttgtgtcttcactgctgggtggctctttgagtctcttatctctcaggaccatgtaacctactggatctactcactgcatcctggccccatttcagtcttcgtttattaaatacagttctgctatccctaactcccgcgcaggggaagaaagtacttactctgaacccaacatataagggcgaacccaacatataagagacatttcttagtggggagaacckgtcatcttcaccttgcctggaataattcagccgggcgagacattttccatttctaccttggggcagctcaatttttatacctgaggccaacttctacgccattcccccccaccccaccacccaaaatcccttcaacctttcatatcttaaactcctttcctttcaggtcgggcagattaggcagcaggctgggagcttcagcaggagaagtgaccttgcctgcagcctcccagatgtctcagtcccagctaagcatcggtaccccggagggccctgccagtgcaatgctctgttaaatct

SEQ ID NO: 693 - DNA, 601 bp, Human
ggtaattaatggggaagacaaaggaatagattatactaaagaacttatctggagataagaatgtgaagttaacttggtaaaaatgaaagaaaattggggaaggaagaagttaagagaaactgggttggtcagtttggaaatatttaaaaacttgcatcaggcaaatgtaggcatagaattccactcacgaactgggagggcagagaaaaagacagtctcgggtaggattactaagaattgaccattctggaaacaaatacagtgcagtctgatctgtaccccagactccacggaagcccastggtggtggtggagggggtggtagtttgtgtcttcactgctgggtggctctttgagtctcttatctctcaggaccatgtaacctactggatctactcactgcatcctggccccatttcagtcttcgtttattaaatacagttctgctatccctaactcccgcgcaggggaagaaagtacttactctgaacccaacatataagggcgaacccaacatataagagacatttcttagtggggagaaccggtcatcttcaccttgcctggaataattcagccgggcgagacattttccatttct

SEQ ID NO: 694 - DNA, 601 bp, Human
gcagataacgtattggaatttatgttaactctcgctggaatagtaattctatttgtcctgaaaatcccagtaggtggcagcaccgatgttcacagtctaccccagccctctgctaagggaacccagcttctttgtaactaacccctaagggataatacaggatgtgcatcactatgaggtgaaagagtgggaggaagaacagcaccgcccagcgttccgggagtaagtgagctttgtgcttcgattagatgaccccactaattttccccaccaatattgtctccatcttcagtcttggacrggatagatacaaagtttgtcttaaaatcccctagtttggggagggaccctcactaactgtgttgctcaggatggtgtttaactcctggactcaagtgatctttaagcctcagcctcaggagtagctgggactccaggcagatgccaccatgcctggccttaaattctgaattcctgaaaccctacttaaaggaataacttccctattctaaattctaattattgtggcctggcactcaccttctcaggagcattgatgaccccagtgttgtagccaaattggaaagagccgattgtagca

SEQ ID NO: 695 - DNA, 601 bp, Human
agttggatgagaacaaaagacaaacattagggatcatttccttcctagagaatcaagggaataaatagacaggaatggaaggggcagataacgtattggaatttatgttaactctcgctggaatagtaattctatttgtcctgaaaatcccagtaggtggcagcaccgatgttcacagtctaccccagccctctgctaagggaacccagcttctttgtaactaacccctaagggataatacaggatgtgcatcactatgaggtgaaagagtgggaggaagaacagcaccgcccagcgttcmgggagtaagtgagctttgtgcttcgattagatgaccccactaattttccccaccaatattgtctccatcttcagtcttggacaggatagatacaaagtttgtcttaaaatcccctagtttggggagggaccctcactaactgtgttgctcaggatggtgtttaactcctggactcaagtgatctttaagcctcagcctcaggagtagctgggactccaggcagatgccaccatgcctggccttaaattctgaattcctgaaaccctacttaaaggaataacttccctattctaaattcta

SEQ ID NO: 696 - DNA, 601 bp, Human
ggtggaagaacagactgttacagttggatgagaacaaaagacaaacattagggatcatttccttcctagagaatcaagggaataaatagacaggaatggaaggggcagataacgtattggaatttatgttaactctcgctggaatagtaattctatttgtcctgaaaatcccagtaggtggcagcaccgatgttcacagtctaccccagccctctgctaagggaacccagcttctttgtaactaacccctaagggataatacaggatgtgcatcactatgaggtgaaagagtgggaggaasaacagcaccgcccagcgttccgggagtaagtgagctttgtgcttcgattagatgaccccactaattttccccaccaatattgtctccatcttcagtcttggacaggatagatacaaagtttgtcttaaaatcccctagtttggggagggaccctcactaactgtgttgctcaggatggtgtttaactcctggactcaagtgatctttaagcctcagcctcaggagtagctgggactccaggcagatgccaccatgcctggccttaaattctgaattcctgaaaccctacttaaaggaata

SEQ ID NO: 697 - DNA, 601 bp, Human
tagaaaccacacaaagataatgctataaaccccatacttcacaggccacaagttcattaaaacacaaaaagttcagaaaatcatacattcttttaccatgtgaaaaaataaacaaattgtgtttcttttcctttctctactcagcatggtttttttttttttttttttttgagacggagtcttgctctgtcacccaggctggagatcagtggcacaatctcggctcactgcaaactctgcctaccgggttcacgccattctcccgcctcagcctccggagtagctgggactacaggtgccygctaccacgcccgaccaattttttgtgtttttagtagagatggggtttcaccatgttagccaggctggtcttcatctgctgacctcgtgatctgcccacctcggcctcccaaagtgctgggattacaggcgtgagccacagcgcccggcctcagcctgcttcttcagctactatctattatctaaaacttccatatgtaattgaacatgtgccagatattcttcagtgctttacctatgttaacttttttaatgacccatgaaactaacactcattaagtatgagaagttctagagtacc

SEQ ID NO: 698 - DNA, 601 bp, Human
tccaagaaccaacttactattttgagcatcaaaatgctcaaaatagtaagttttgcaaaatgctttgttacaaaataatttaatcccattgatcaaagactatctgaaaacccttaggggatgaatcagtatttaaaaaggtgggacaagggtgctcttaatatccatattgactagaaggcacaggaatactctcttcctacaatccacagtcaaatgcaggaagctgatatttgcatggaatacaagggctacctgccaaatgctagcttccgttgtgccgccctctttaaactatcayctatcatgccctctttaaactaccatgctcgctatactagttgtaaaaacagactggtaaagtcagttcactctgaagttgccagtgtccttccagggtcttttttttttttcctttttttaaatttcagagacacagtctcactctgtctcccaggctggaatgcagtggcataattatagctcactgcaacctgaaactcctgagctcaagtgatcctcttacctcagcctcctgagtagctgggactacagaggcacaccgccaccatgcccggcattttaagtgaaatactttaag

SEQ ID NO: 699 - DNA, 601 bp, Human
tacattctttaaagaggtgctcattctcagggctacacttgcacgtagctgcctcacctgcctagtcccagctctgctgctctggaaagtctcgggagcacatttttctccagtaatacgtgtggcctacattatcatttccaaatgaagaaatttgagactgggattcatcaaaatcacctaggaggctttttctaactactgtgtatttcctcccaagttttttttttaaagacagggtcatactatatttcccaggcttgactcctgggcctaagtgatattcccacctcagcctccygagtagtagctgggactacaggcatgagcagccaccacacttggctcctcatagattctgacataacagcctctaacccctcataagaagcactgccacttcaaatacaaatatcctggtgtgctaggtaggagaaaagttccaagaaccaacttactattttgagcatcaaaatgctcaaaatagtaagttttgcaaaatgctttgttacaaaataatttaatcccattgatcaaagactatctgaaaacccttaggggatgaatcagtatttaaaaaggtgggacaagggtgctctta

SEQ ID NO: 700 - DNA, 601 bp, Human
gagttgcctcaggtgcattctttcattctttcttttttctttttttaaacaggcacagaactaacgcaaggtacattctttaaagaggtgctcattctcagggctacacttgcacgtagctgcctcacctgcctagtcccagctctgctgctctggaaagtctcgggagcacatttttctccagtaatacgtgtggcctacattatcatttccaaatgaagaaatttgagactgggattcatcaaaatcacctaggaggctttttctaactactgtgtatttcctcccaagttttttttttaaagacagggtcatactatatttcccaggcttgactcctgggcctaagtgatattcccacctcagcctcccgagtagtagctgggactacaggcatgagcagccaccacacttggctcctcatagattctgacataacagcctctaacccctcataagaagcactgccacttcaaatacaaatatcctggtgtgctaggtaggagaaaagttccaagaaccaacttactattttgagcatcaaaatgctcaaaatagtaagttttgcaaaatgctttgttacaaaataatttaatcccat

SEQ ID NO: 701 - DNA, 601 bp, Human
tcacttgtcatttctcacaggtgatcttttactgatcctgttttgcagggcctggactgtggtgaggcagctagggagttgcctcaggtgcattctttcattctttcttttttctttttttaaacaggcacagaactaacgcaaggtacattctttaaagaggtgctcattctcagggctacacttgcacgtagctgcctcacctgcctagtcccagctctgctgctctggaaagtctcgggagcacatttttctccagtaatacgtgtggcctacattatcatttccaaatgaagaaatytgagactgggattcatcaaaatcacctaggaggctttttctaactactgtgtatttcctcccaagttttttttttaaagacagggtcatactatatttcccaggcttgactcctgggcctaagtgatattcccacctcagcctcccgagtagtagctgggactacaggcatgagcagccaccacacttggctcctcatagattctgacataacagcctctaacccctcataagaagcactgccacttcaaatacaaatatcctggtgtgctaggtaggagaaaagttccaagaaccaact

SEQ ID NO: 702 - DNA, 601 bp, Human
ttgaacccaggagatggaggttgtggtgagctgagattgcgccacagcactccagcctgggtgacagaacaagacttcacctcaaaaaaaggatgggccaggcgcagtggctcacgcctataatcccagcatttaggaaggccgtggcaggcggatcatgaggtcaagagatcgagaccatcctggccaacatggtgaaacctgttctctactaaaaatacaaaaattagccaggcatggtggcacacgcctgtagtcccagctactcgggaggctgaggcaggagaatcgcttgaacccrggaggtggaggttgcagtgagccgagatcgtgccactgtactccagcctgggcgatcgagtgagactctgtttcaaaaaaaaaaagaatgtacacaccatactctgaaatggcaggagtctgtccctcagactgctcacggatcacttgtcatttctcacaggtgatcttttactgatcctgttttgcagggcctggactgtggtgaggcagctagggagttgcctcaggtgcattctttcattctttcttttttctttttttaaacaggcacagaactaacgcaaggtacattctttaa

SEQ ID NO: 703 - DNA, 601 bp, Human
cttgaagattcctgttgagtaatagaacacctaggagaaaagaaaacatgcagctttgatgcaattctgcacaccagttacacagaaccctcaaaaataaacttaaaagtcccagtgggtaagaagtcctttttctaggttttcgttcaatactaatatcccttctgcaaatgaattatcttctgtatcttatctcctagtctggatctgtcacccaggcaggagtgcagtggcacaatctcagctcactgctacctccacctcccagattcaagcgattctcctgcctcagcctcctgartagctggactacaggtgcctgcaaccacacgcagctaatttttgtagtttaagtagagatgggttttcaccttgttggccaggctggtctcgtactcctgacctcaagtgacctgctcgccttggcctcccaaagtgctaggattacaggcatgagccaccgcacctggccctcctttctctctctaaatgttcttaattctagctactcatttacattgtttcttctaaaaatgcttattcccactgttccatttcctcttgcttatgtccacttcactaacttacataaaggtgtaat

SEQ ID NO: 704 - DNA, 601 bp, Human
tggtccccaactcctgacctcaagttatccacccgcctaggcctctcaaagtgctggaattacaggcttgagccactgtgtctggccgcaaattaaactttatgaattatttatttctgcaattttccatttaatatttttagactacaggtaactgaaactgaagaagaggagggactgctgtatttttttatttatttagggatggagtcttgcttccatcgagcaggctagagtgcagtagcgcgatctcagctcgctgcaacctccacctcccaggtttaagcgattctccttcctygatctcccaagtagctggaattacaggcatgcaccaccatgcccagctaatttttgaatttcaccatgttggccaggctggtcttgaactcctgacctcaggtgatccacctgcctcagcctcccacagtgctaggattacaggcatgagccaccatgccaggcccagactactgtattattaaggagtatcttcatgtcagcttacataggctggttttaagataaggtgagtttacttacagcagcggaggggaagagcaatccgactaggaagttggaggtccagttggagcagccg

SEQ ID NO: 705 - DNA, 601 bp, Human
acccggcctaatttttgtatttattgtagaaacagggtttcaccatgatagtcaggttggtccccaactcctgacctcaagttatccacccgcctaggcctctcaaagtgctggaattacaggcttgagccactgtgtctggccgcaaattaaactttatgaattatttatttctgcaattttccatttaatatttttagactacaggtaactgaaactgaagaagaggagggactgctgtatttttttatttatttagggatggagtcttgcttccatcgagcaggctagagtgcagtarcgcgatctcagctcgctgcaacctccacctcccaggtttaagcgattctccttcctcgatctcccaagtagctggaattacaggcatgcaccaccatgcccagctaatttttgaatttcaccatgttggccaggctggtcttgaactcctgacctcaggtgatccacctgcctcagcctcccacagtgctaggattacaggcatgagccaccatgccaggcccagactactgtattattaaggagtatcttcatgtcagcttacataggctggttttaagataaggtgagtttacttaca

SEQ ID NO: 706 - DNA, 601 bp, Human
tcatgagtatgagggtctcatacaagtctcaaagtcaacaggcactgagtagccaagtcaggatttagagctcattttgtggttacaggaaggacaaaaagtaaataagcccataatgtcgtgtacattcagaatttttattttaaaacaaagaaccagagtaacaatagaaaatccatatggaaatattcacaatcttctcagtgagaaatgggaccctgccttactgccaacctactgtttgaggagccagaagttgacatgaagttgcaaggtcaccttttcaagctaaagcacactygatagctatgtgcatttttttttttttgagacggagtctcgccctgtggcccaggctagagtgcaatgatgcgatctccgctcactgcaacccctgcgtcccgggttcacatgattctcccgcctcagcttcccaagtagctgggattacaggcgcccgccaccacgcccggctaatttttgcatttttagtagagacagggtttcacgatgttggccagactggtctcgaacccctgaccgcccgcctaggcctcccaaagtgctgggattacaggcgtgagccaccgcatccggcctc

SEQ ID NO: 707 - DNA, 601 bp, Human
gaggaaacactcgcagtcttttgccagattcattgttagcagctgggatcctccatgcaattcaattcgagtccatctcaccagagtccacagaaagtttcgcttgtttcccaagttgcccaaactttccttccgagagcattccattgtgctgaatgcaaacacgccgaggtcctccgtccccccactagactccagagattacgaggaaactgcttgcgttattttcccccctgtatgaattgtagccagcagagactgtggaattgatgtattgctgtctatttttacactagcagcragcagctccacacacagtcctgcataaactctattctctctcagcttcaggcagctctccgtggtacaggaagatttaaccattggcttccctgccaccgacgcgaacggaaaaccttgcactgccaggcgtttctttttattcgctggccaaatctttcaaccacgtataggagttttaaaggaagcagcatcgttgttttgtgttctgtgggaaaagcaatctaaaatagcccagcaggattatttaggattttgtaagttctctgtctgatgaacagagagagaggggggaaaaatc

SEQ ID NO: 708 - DNA, 601 bp, Human
ggagccaacatttgcaaacccagcaaagagttaagaatcccgggcatgcctcgctagataggaaaaatgcattcacagacggccttggccaaattattttcactttagatgtgtatcgctgcaccacatggacatcttatttaatcaaatcacgtgtgggcttgatcctcccccttaccctacgtgcccccagctacccagaggaaacactcgcagtcttttgccagattcattgttagcagctgggatcctccatgcaattcaattcgagtccatctcaccagagtccacagaaagtttygcttgtttcccaagttgcccaaactttccttccgagagcattccattgtgctgaatgcaaacacgccgaggtcctccgtccccccactagactccagagattacgaggaaactgcttgcgttattttcccccctgtatgaattgtagccagcagagactgtggaattgatgtattgctgtctatttttacactagcagcgagcagctccacacacagtcctgcataaactctattctctctcagcttcaggcagctctccgtggtacaggaagatttaaccattggcttccctgccaccg

SEQ ID NO: 709 - DNA, 601 bp, Human
gagaggggcagtaaagaatgacagtcttagtggggtgtatgtcatgtgaattgtctctatcaatcttagtaaccttactgtatatcaccttcattaaactgtgaaacacggggcactccaagtagctatagtgatataggcctatattaaccaatgtactaccctgtcattatgtgcaaaagggcataatacgttttaggatgacagcaaacattaatgattcaaaaaatgaaaactgccaacgctacctgctgctcgtaatattttatacaggcggaggtgattcccagagccgctgccrtgtaggcaaagcttctagcagctagctgcctatagtgcaacagagaagtgactggccaatctcagccgactggcgactctatccatggctggacaagtagccaagacctttcctccttaagaaaaaaatttaaaggccactattctaaatgcttctgatgtttatttgaaaatgactgcaggaattccaatgattaaaataaatcttccttatttccatatgatctagttcctcaatcaactcctaacagcatcaggaataatacatgatggaaaaatgaaactacagcagctgagaccc

SEQ ID NO: 710 - DNA, 601 bp, Human
acacaaaaggctaattattgtatgttatttcaccccaacagacttttctcttagttaaggagcagacaataaattagcttaactgcactgatgataatgaatcattataattaagtataattctccattaaccttttggaggtttttgtgccattgatggtaaattttaaagagagagagagaagaaggagtggacttggccacattaattatattaatgaaaaaagaaactgggttcttaaaaaaattagttaagacaggggaaagggggtggagagaggggcagtaaagaatgacagtsttagtggggtgtatgtcatgtgaattgtctctatcaatcttagtaaccttactgtatatcaccttcattaaactgtgaaacacggggcactccaagtagctatagtgatataggcctatattaaccaatgtactaccctgtcattatgtgcaaaagggcataatacgttttaggatgacagcaaacattaatgattcaaaaaatgaaaactgccaacgctacctgctgctcgtaatattttatacaggcggaggtgattcccagagccgctgccgtgtaggcaaagcttctagcagctag

SEQ ID NO: 711 - DNA, 601 bp, Human
taaacacaaaaggctaattattgtatgttatttcaccccaacagacttttctcttagttaaggagcagacaataaattagcttaactgcactgatgataatgaatcattataattaagtataattctccattaaccttttggaggtttttgtgccattgatggtaaattttaaagagagagagagaagaaggagtggacttggccacattaattatattaatgaaaaaagaaactgggttcttaaaaaaattagttaagacaggggaaagggggtggagagaggggcagtaaagaatgacrgtcttagtggggtgtatgtcatgtgaattgtctctatcaatcttagtaaccttactgtatatcaccttcattaaactgtgaaacacggggcactccaagtagctatagtgatataggcctatattaaccaatgtactaccctgtcattatgtgcaaaagggcataatacgttttaggatgacagcaaacattaatgattcaaaaaatgaaaactgccaacgctacctgctgctcgtaatattttatacaggcggaggtgattcccagagccgctgccgtgtaggcaaagcttctagcagc

SEQ ID NO: 712 - DNA, 601 bp, Human
aatgtaggctgtctacatatggcttaagttcctgttgtgaaacttaggaaccaaccatgttttggaatgctaaagtggcatactgatttgtggacaacttcttcctgtccctctctttaactgccctctttggcatgacttgctcataaccctttaaccttccataaatatgtatttttaaataacttttgaaaaccattgaaaagaccaggtcaatttgttgtattggtgctatcttgtcatttacatattcctttccttcctctcacttgttcgctcgtgcgctctctctctctctcttattttgcttttatgttatggttgagaaaagtgcatgtgttcttgccaatgttgacatgctaataaaatctgtgcttctgaatgtggcattatcctgctaatctaaaacacattagtggtagcaagtgttcctgttattaatttatatttggcctttggacaatgccagacttaacagtccaagccctgtaactgtcctcatctgacatgctgatatttactgtttccctatacctctgtaacaggtgtgctttattgcaactacacagacacattctactgcctctttgcaactatgaca

SEQ ID NO: 713 - DNA, 601 bp, Human
atggaaaaagaacagaggaactacactaggaaaaattttctccatttacactccttttaagcattataatccaaataattcatttagcaactaatgatgcaaagccctttgactcatctgtggttctcctgaattgttatttaaatcatttactcttatttgactcttcatgactttctggacttcatccttaaaggcaaaagcaagttccttaagatgaaggacaaaaatcataattttttttctatacggcttttgtatgtaacttgcaagatgtgtgtgtgtgtatgtgtttgcacaygtatgtgtgtgtacggttggaatcacctagtacctggaaaagaaaactcacaatagcataccatcactatattttgttcattatttatgtatatctaaactgtgctctacgtgaattcaaaataactatttttgtttagagttttaaaataatttctacatattgagaggtttaaaatatctctaccatggctgggctgcttatcaccaagattattttagattgtcaaagcatttcatccccttacatgaaatagacagtctttttaactgttttaccatgcggcttttggaggcaagt

SEQ ID NO: 714 - DNA, 601 bp, Human
ttaaagtcaggaatgtgtctttttcatgtagattgtggtatttgggtgaatgcatgaataaatgaacaaataaatgagacatcaacacacaaccatggctagacaatcatcctaaggaaaagaacctgactccaaaacgttttatggagatcatacgtgatgttcagtgagaaaaaaattacaacaccttaagaaaggtaatttcaatcgatcctcctagttatctctaattgttcatgtattttccgcattttgattttgaataataattcaaataatcactgaagttgagcatttattrgttcttacttgtcagccatgtttcatttcttttaagcctttcataactaaagaattttgtctgtttgtcaacaggttttgttctggggtgagcgttttgtaccttgccacagatatataccaaatacagccagtctcatctaaagaaaatttcctccaaaggcctatttaattcttcattgtcatgatttgtaaaagtttactaaaagaaaaaaaaaacaactttaaaacctgtgctgccgggctgggtcacatattacaaggactttaaatttggccccagaaaatgcatgcatgacca

SEQ ID NO: 715 - DNA, 601 bp, Human
tagacactttacttggataaatagtatttgcatatttatagatttagatctacacagttgaatggtatatcatacatccagaaatatgaagctcatatcttcaacaaattagatacattgattcagtttttcatttacacagataaatgagctgattttacattaatttttgagtatgtctaatataacaagtttttcaaaaagaatccatttatgaagaaactttaccaagttttatgatactcaactaataattaggataattcatacaacttccatagaaaatataaccagatattarctatatgctatgtgacacaataaatgtacattgaaaatcagtcactgaaattctggttttcaagaggtagggtaggctatttgaaatgctcaaaggaagactctcgaattctgattgttgggtacaggtaaggtcaaagtcaatgaaaggagaggagatggcaacagtcatagttaatgagaccaaaggcaaacaggaaatgagagccataagaaggggacagtccccaaaccacatacagaatccgatccctgaataaacccagactctctaattccaccattagaggagtattgattt

SEQ ID NO: 716 - DNA, 601 bp, Human
atatctatgcttatctataagcatatgtttatgtgtatgtaggtttatgtcaattttttctcattaaaataattactttcaaaaggtcaagtggtagttatttatgtaatgaaaatcatagtgtcaaaaccaaaaaggtctttagaataaagtttcttatcttatggttgaagaaactgagacccaatgatactaagtgatattttcagggccataaaatagttactcacagagttggccaagattctgtttcctttatcctattgtcaaaagaaattgcattcaacgactttaaagtaawttaatcaaccccagcaatcaatttttttgaaatgtgaaaatattattcatgtccaaattaacctgaaattagacactttacttggataaatagtatttgcatatttatagatttagatctacacagttgaatggtatatcatacatccagaaatatgaagctcatatcttcaacaaattagatacattgattcagtttttcatttacacagataaatgagctgattttacattaatttttgagtatgtctaatataacaagtttttcaaaaagaatccatttatgaagaaactttaccaa

SEQ ID NO: 717 - DNA, 601 bp, Human
taaagaaaaaaaaaagaaactaattatgtaatattgagtgtcttttagatttcttttctctccacaacagtcaagttggaaaaacaaccagaaaactcaaagactaaactaaggaattctctgaatattgaatcaaagtcagacaaaagtccattatgctaaaacaaattccaaacagcgtttgcatcagtaaactaccattcgaaaacacatatgaaaatagaatttttccaaaaatgaaccctccctgttacagatacaaaatttgcatcataccatcagagagaaataatgttttctrttttaatttggaatacagtacacggtttgtttagacaagaaaacagcagagcaactataaggcgacagaacattatgaatattcagttgattttactcctaaaacgtataattttatatctagccctgataatagttatttctatgaggccaaagctcatgcagtaactattccactcactgaaaattaattgagagatgatggcaaattgtgggcattgatccagatggtttagaaggggttcagatccccaaatctgatagacaactaaagtaaaacaccatgttaatcagttgaaag

SEQ ID NO: 718 - DNA, 601 bp, Human
ggtaatttagcaaacacaaagtgtgaaattaaactagcaacaatgaccacggtgcaggtaggcaccatagttctggttcaaagcatcttgtttaatgtactgttcctttaaccttatcagcaatggccagagccaaggaatttcttgtttagacatcccacgactcactttttggtggggttcaagtacctaaacttaaagcacttagtgcaagggcaccatttgcaaccaactcagaagtttgcctaagagctcttcagttagtctaagttttttaagcgcttcaatattttttattagktttttttttttaaataaacaactggaaatatttgcagataacttcttatccaattttgtattctttgttaatttcattaaccacatagacagtacactctgttatcttattacacacacacacatatacagacagacacacacaagttctaagtgaaatataaggcttacctgcagttccagagagttccacacttaaggtgcgttcaatagtcttgttctcaaatggggaacccttggggtcactggaagatatggcacatttataaaaacaaactgaaatggagttgctgtagccaaa

SEQ ID NO: 719 - DNA, 601 bp, Human
gcctccagtacattttaagtatttctcctatcacccctggttactgggtaacaaactggccttggagaaaagcttcagaacattcctatgacataagcctaattccccaactcttgctcatggaagatgaagatatcattaattgacccttgtgtaaattccccacagagctgggatagaggatgggtaaggggaacctggcatttcaggtggctattgccaaaccccaaagctgatgtgggagagaaaattcctttgctatccttggcttacaagaaataggatggtaccatttccagaraagaaaaattaggaataaaggaattgtcattatagacactgggtcaaaatgaatgaaattgaaaatagaaaatgaagaatatggttgaaatatggaagaaatctctgacagtaagagtcgccaagcattggaatgggctgtaaaaagaatttgttgggtcttcctttcttagattcttgaagcacaggaatagattatgtggcctgtcaaaatcaccttccagttctctgatgctatgcttttccttttaaaactactgacaactacccatattttactttggtccactttcccaaagat

SEQ ID NO: 720 - DNA, 601 bp, Human
gtgatcgggaacacgacctgtgtcgagaaaaggaccttgaacgagagcgcatcctttggggtctttgagaaaataaggatttgggtggtgacacagaatctctacatggagagttaaaagaagaacaagaaggagacacattgaacaatgaataggattgtgtgccatcccaagggtagctcagtttatcactttcatcttcgctgtcatcaaacaggccatccatggctagtcctgaatttataaacataggtagtttggagaattgttcattactgaaatcactgtccctcagttcacyggtcttgtctgcttcgtcgtcaaaaacagcttgactgggatgaccgaagtgcttgttcagctcggctcggatttcctggtcttggagctgttttcttgtgctgcaaggagagacctgcttgcttgcctccaaagtctctctcaggtagcactggtctgaatctgtggaagaacaaatctgcccctgccaatcagaggagacatctttattttctagttgtctagagtcttggagctcctgtgatatattaatgagtatttccgttttggaattaattgactggcaatagtcatggtcacc

SEQ ID NO: 721 - DNA, 601 bp, Human
cctggcacagtgtctggcatatggaagcactcaacaaataacaggtgtttctttctttttttttttttttttaaagaaagcagagtgtgatttagtatatgaaatttaattttcttctctcttagttgtagttcatagaaaatgatgatatttctaagtgtctgtgaaataataagagaaaatgagacttgcatattctgttccataaaacaatgatggcaatgctatggttcgtgaaaggattcagggtaggcctggaaggcaaaatcaggttacaaacacacacacacacacacacacrtgaatcataaacacatgtagacacatacaatacctgcatacatacacacacaaagacacatgatagccacacacatctgcataacacacgcacacacaaagcacaatactacacacatacatgtttaatattcacacaacacacacagacacacacaatatccacagagatacacacaatacatgcactcacaaaatataaagctgcatgcacacacaacacacatacagaaatcatgaacacatgtggaaacacacaatatccacatacatacctaccacaattttcagcacctgagta

SEQ ID NO: 722 - DNA, 601 bp, Human
acaaaatcgaaatggtcaaagtaatagaaggatataatactagatactacagaggcataatcgttgacctaaaatgttgttttgctgacaagattgcaaaccaagctctctagctccggcctgaccatcccatttccaaagtttcaatctacctttacatacctagatttaaagacaaagaaatgtctttatttatgttttcctttcattctgatcacctttggtctttactgagtttttttcagcaagttttttaaggtaagagcaacgagaacaattacagtctcaatcataaaaaacrgagacaaaactggccaatctttcctcaatagcatcttaaatagtcaattcttaaattacactggcttcaacgcttctcttcataggctaatgaatggttttcttgtattgctaaggcctcacaaacaactgctgttcaaatcaaaatcttttttgtagagacaaaaaaaaaaatgtctagctcattgctagagattagtctgaaatcagaattccacttgcattgtagatcaagagggaagattcccccagtgatggagtctgtgtgataaaagtcagcctggaaccatcagggacatac

SEQ ID NO: 723 - DNA, 601 bp, Human
gctattctaggtcatctatagatcaggtcttagactacagtgattgaagttctcattacagccatcaagaaaggacacataatcattacctactggaagctcacatctaaaggcatgaaaaggtttccttttatcaactgacccaaacatcataccccaatagtgcaaagttccctctctgctgctttgaatgttgacagcccaactgttgttctcggagtcgtttagcaaaaaattgattttgttgcactggaagaattattctgctacatctcttttaaaaaagaaaaaaatccacatyactaaagcaccagttcggttaccaaaattgtagatgtggtacttaccacggcatgaaggcaatggcccacggtcttctaaaaatcctacagatctatgctgaaatttgcctccagtgatgatggggtgcacgtgttcatttgaaatattctctcccaaaaaaataaaaataaaaatgagaggagcacagcttacattttgatgggctacccacagtgtctgcagaagatacaaaagctccactaattctagatgcaatttgaagtccattgaggaaaactatcttcatggtaacaatatt

SEQ ID NO: 724 - DNA, 601 bp, Human
atacatgtagaattggcaggtggaaaaaaggcccggcaagggctcaactaatcgctcactttccctcttcagcatagttcaaccaacagtattacactttcacctacaaatcttaaagtagctccatcaaatcagcagttcacattattgaaaatgtctgtcacataggtacaaatttagaatcatcacattatagtacatggctattctaggtcatctatagatcaggtcttagactacagtgattgaagttctcattacagccatcaagaaaggacacataatcattacctactggaarctcacatctaaaggcatgaaaaggtttccttttatcaactgacccaaacatcataccccaatagtgcaaagttccctctctgctgctttgaatgttgacagcccaactgttgttctcggagtcgtttagcaaaaaattgattttgttgcactggaagaattattctgctacatctcttttaaaaaagaaaaaaatccacatcactaaagcaccagttcggttaccaaaattgtagatgtggtacttaccacggcatgaaggcaatggcccacggtcttctaaaaatcctacagatctatg

SEQ ID NO: 725 - DNA, 601 bp, Human
aggagctctgtactgtcaggggcggggctctgagtagcgaggccgggtctgaactatcaggcgcggcctctgcgagctgggggcggggttctgcaccggcgggggcggggttgtgagtggtgggggcggggtctggagcagcaggcgccgcgtttgcgagctaaggtcggagttctgcaccggcgggggcggggctctgcgtggccggggcgggctcggggatccgcggggcgactcccggtctggcttgggcaggctgcccgggccgtggcaggaagccggaagcagccgcggccccagytcgggagacatggcgggcgttaaaggtacatcgcggtccccggctcgcttgtcgtgtggtggggttgccacctccgttccggtcaagcctggggctgcgccttccgcgcgccgttggggaacggcctcaccacccttcccgcctctccggttcgggaggcgatcgaccgctcccttcgtcccttggggtgtgggtggagcggcgtttcgggggagccttggccctttttgcaaggccgctggccttcctgctctccagtggcggcaccagacccctccccagcctgagccctcggcgaga

SEQ ID NO: 726 - DNA, 601 bp, Human
gaactatcaggcgcggcctctgcgagctgggggcggggttctgcaccggcgggggcggggttgtgagtggtgggggcggggtctggagcagcaggcgccgcgtttgcgagctaaggtcggagttctgcaccggcgggggcggggctctgcgtggccggggcgggctcggggatccgcggggcgactcccggtctggcttgggcaggctgcccgggccgtggcaggaagccggaagcagccgcggccccagttcgggagacatggcgggcgttaaaggtacatcgcggtccccggctcgctygtcgtgtggtggggttgccacctccgttccggtcaagcctggggctgcgccttccgcgcgccgttggggaacggcctcaccacccttcccgcctctccggttcgggaggcgatcgaccgctcccttcgtcccttggggtgtgggtggagcggcgtttcgggggagccttggccctttttgcaaggccgctggccttcctgctctccagtggcggcaccagacccctccccagcctgagccctcggcgagagcggcgccctccacctctcctgagtttttaaacaaggtttccacttcttg

SEQ ID NO: 727 - DNA, 601 bp, Human
ggtgacatatctattccaaaccccttcccctctctgtgtctcctttctcactgttgaaagaagggctttgaagtagagaatgtctaagggctacttcccacaatattgtttggtgattcttgaaacatactatcatccctctagtttaaaatcaggggtccaaatccactgtttccatcctgagtcctcttgaaggacacattcccttcttgccttttggttgcctagatctgtggctggaatgggaggctttcattagtgtggcttcatcccaactcctgcttgtaggtgctgtctgggygtatctgtgtgattacagtattgtggtgatatgaattattgtagtgtatatataaaaatgagcagagactttttttttcttaagaaatgaagcataagaaatgtctgatggagaaaaaaagattatttttgaagtactgatagagaaaatactgttggaaaccagatggcaattttttttttataattgcaaaatgttgaaatttgggaggaaaacagttttgttttgtttttgcattacactattaattgtgagctcttataatgaagatcaaagtacatctaagcttttcactagtga

SEQ ID NO: 728 - DNA, 601 bp, Human
caggggtccaaatccactgtttccatcctgagtcctcttgaaggacacattcccttcttgccttttggttgcctagatctgtggctggaatgggaggctttcattagtgtggcttcatcccaactcctgcttgtaggtgctgtctgggcgtatctgtgtgattacagtattgtggtgatatgaattattgtagtgtatatataaaaatgagcagagactttttttttcttaagaaatgaagcataagaaatgtctgatggagaaaaaaagattatttttgaagtactgatagagaaaatastgttggaaaccagatggcaattttttttttataattgcaaaatgttgaaatttgggaggaaaacagttttgttttgtttttgcattacactattaattgtgagctcttataatgaagatcaaagtacatctaagcttttcactagtgagcatatttattttcatgccttccgtacttaaaatttatttattattttattcatttaacaagtataaatggagtacatcattctaggccctggagataaatggcgtttgatcaagactaatctatcagatgggaataagtgttgtgcagaaa

SEQ ID NO: 729 - DNA, 601 bp, Human
ggtacattagaatagatgaccagggaaagttctgcttttagaaaggaatctgtcagtttagatcacatggtatgaaggagtcagccaatgagaagatcatggggaaggacattgcaagcagggggcacagctagcgcaaaggccccaggataacagctatgagctcaagagtgttcaagggacagaaaaaaggctggtgtggctacagattaagcaaatgaagggaaaagagtacaaaatgaatggaagaagtagataataccagaccataaaggctttgtaggctagggcaaggaatttrgggtttattctaagctcttaaaaggtttcaagcatgcgtgcactcaaaagatctttaccgaactagcttttgcaagacactctactatgttctatagggaaggcagaaatgaccaagttaaaattctgtctttaaagaaattgtggctcagtggtacagaaaacagtaaagtttctagggtatatattatatagtggcttcttaacacaatataagctacctacatagtaattttaaaattatcactacttatctatccctggtagaaatcatcttatgttctaatattcacaattaatt

SEQ ID NO: 730 - DNA, 601 bp, Human
cgcaaaggccccaggataacagctatgagctcaagagtgttcaagggacagaaaaaaggctggtgtggctacagattaagcaaatgaagggaaaagagtacaaaatgaatggaagaagtagataataccagaccataaaggctttgtaggctagggcaaggaatttagggtttattctaagctcttaaaaggtttcaagcatgcgtgcactcaaaagatctttaccgaactagcttttgcaagacactctactatgttctatagggaaggcagaaatgaccaagttaaaattctgtctttraagaaattgtggctcagtggtacagaaaacagtaaagtttctagggtatatattatatagtggcttcttaacacaatataagctacctacatagtaattttaaaattatcactacttatctatccctggtagaaatcatcttatgttctaatattcacaattaattaattttttgacctaaacatttaaaatagcaatgattttgaaatagtagtatgtctttcatttaaaatgtaactgttacttttctttttggattttgcctgggtccaactgacagcgtttactggcccttattcg

SEQ ID NO: 731 - DNA, 601 bp, Human
ataatttattcaattatttgctattcactgtctttcctactatttgattttattccctccaattacgttctattttaattttatgaaactcttatttgaggcattgaatatcagataagcgcaagtcttgttcattcaataaatatctttgcaacaactgctacttgtaaaacaccagaaataagaaataggtactgtctctgctcctgaggaacacagaaactagcttgctgggtaagtatactataagtgtactaagtgagacggttgaagcatgatcagaatgccataggggcaccargaagagagaaattccgactggcatttgatatgggcctctaaggataaatagcatttgtattgaggtaggatggctgttgtatggaatgacattcaagtgtaagaatgcagtatatagaataaagaagaatccagtgtggtagagctaaaagaaagttgttgaggttaaggctggaagggttgtgaaacctgattagcaatggtcttgaaccccatgccagtttgatctttgtctagataatggggaaagattgaaggtttttgaatacaacaagattgtcatgactttatttttcttgtg

SEQ ID NO: 732 - DNA, 601 bp, Human
ttctattttaattttatgaaactcttatttgaggcattgaatatcagataagcgcaagtcttgttcattcaataaatatctttgcaacaactgctacttgtaaaacaccagaaataagaaataggtactgtctctgctcctgaggaacacagaaactagcttgctgggtaagtatactataagtgtactaagtgagacggttgaagcatgatcagaatgccataggggcaccaagaagagagaaattccgactggcatttgatatgggcctctaaggataaatagcatttgtattgaggtrggatggctgttgtatggaatgacattcaagtgtaagaatgcagtatatagaataaagaagaatccagtgtggtagagctaaaagaaagttgttgaggttaaggctggaagggttgtgaaacctgattagcaatggtcttgaaccccatgccagtttgatctttgtctagataatggggaaagattgaaggtttttgaatacaacaagattgtcatgactttatttttcttgtgctttagaccagcccttcttaagcgctgcagtaaatatttatattttttcctttcaatactgccatca

SEQ ID NO: 733 - DNA, 601 bp, Human
ctgtatacatgtgcacatgcggcattttactatgaaatttaatatgctgggttttttaatacctttatatatcatgttcactttaagaaagacttcataagtaggagatgagttttattctcagcaaatagacctgtcaaatttagattatgttactcaaattatgttacttgtttggctgttcatgtagtcacggtgctctcagaaaatatattaacgcagtcttgtaggcagctgccaccttatgcagtgcatcgaaaccttttgcttggggatgtgcttggagaggcagataacgctraagcaggcctctcatgacccaggaaggccggggtggatccctctttgtgttgtagtccatgctattaaaagtgtggcccacagaccaagagcctcaacatttcctagagccttattagaaatgcagaatctgaagccccactctggacccaggacattttgatgagatccaaaggagttgtatgcacatgaaagtttgagaagcatcatcatagagaagtaaacatcacacccaacttccttatctttccagtggctaaaccacttaacctctctgggtgttacctgctcatttgtttaa

SEQ ID NO: 734 - DNA, 601 bp, Human
tgaagaaagattccagcagcttatagaaggatagcaatattttgggacagggaaaatcctgtcatacctcatctcttcctcaggaggagttctgagctggtcctgcttttcatagttgtttcttttcttccacttaagaactcatagatttttcttactgtcctaaggaagtccttacctctgaggtatctcctcaatgaatactgttttcaaggctgaaatagttcattatgttaataaccttctttatgttctcagggaaatgcttaggtggtgtcacaaaatgtgccttttcttttcyttttttttttttttttttgaggcagagtctcgctctgttgcccaggctggagtgcagtggtgcgatcttggctcactgcaagctccgcctcccgggttcacgccattctcctgcctcagcctcccaaggagctgggactacaggctcccgccaccacgcctggctaatttttttgtatttttagtaaagacgggtttcatcgtgttagccaggatggtctcgatctcctgacctcatgatccgcccgcctctgcctcccaaagtgctgggattacaggcctgagccactgtgcccagcca

SEQ ID NO: 735 - DNA, 601 bp, Human
gtaccttattgcaaaaatcccactgagtaatagctcataaattataatctttcaaatagccatgctaccagcgtacaacagtgatacatgtaaccccaaatgtgatgtgagaggacgattactttgtaaataaaacttgttattgacattttaacaaaggcttttatgtacattattaaatgaaaaagtttatattttactttgcggtacgttacatttggaaaggagatcagcaagttaattttcccagtgtttttgtctgtataatcttaatgtgaatctgaccagtttgaagcctgtrcttgctgtagttgaagagaaacagttcaggaatgttgtgctgactggaaggaatccaggccttaatttctgtggctgacactccccatggtggacatggaagattggaaaagctgtattggaaaagaaaaaaacctgacaccttaagaaaagtgctctacatattttgaagagtctttttgcacactacagaaaagaatgcactaatagaaagtagtctttaaggaataatatgtcctccttatgcacaaaacatttgggaaagatctgatgttttactagtggatttaggcagccagat

SEQ ID NO: 736 - DNA, 601 bp, Human
tgcgatattggagaaaggacacccatataaatcaattgaatagaatcaataattcagaaatagacccaaaaatatatggtcaaatgatttttgatgttaaggaaaaaataaaaacattttaagctgaggagatacaggacaaattatttgccctcatggagcttaccttcaaatgggcaagacaaataatttttaaagtaaaaaataattcaatagtgaaatttgggctgggtgcaatggctcatgcctgtaatcccagcactttggaaggctgaggcaggtggatcatctgaggtcaggrgttcaagaccagcctggccaacctggtgaaaccctgtctctactaaaaatacaaaaaattagctgggtgtggtggcagatgcctgtaatcccagctactcaggaggctgaggcaggagaatcacttgaacccaggaatcacttgaaggcagaggttgcagtgagccgagatcatgccattgcactccagcctgggcaacaagagtgaaactccatctcaaaaaaaaaaaaaaaaaaaagctgggcgcagtggcgtgtgcctgtaatcccagctcctagctactcaggaggctgaggcagg

SEQ ID NO: 737 - DNA, 601 bp, Human
ggctcatgcctgtaatcccagcactttggaaggctgaggcaggtggatcatctgaggtcaggagttcaagaccagcctggccaacctggtgaaaccctgtctctactaaaaatacaaaaaattagctgggtgtggtggcagatgcctgtaatcccagctactcaggaggctgaggcaggagaatcacttgaacccaggaatcacttgaaggcagaggttgcagtgagccgagatcatgccattgcactccagcctgggcaacaagagtgaaactccatctcaaaaaaaaaaaaaaaaaaaagctgggcgcagtggcgtgtgcctgtaatcccagctcctagctactcaggaggctgaggcaggagactaacttgaacccggaggcggaggttgcagtgagccaagatcgcaccactgcactccagcctgggcgaggaagagagattctgtctcaaaaaaaaaaaaaaaaaaaaaaaagaaaaagaaaattgacagtagtgaatgctatgaagaaataaatcaggataaaggcatagagaatgacttacagtggtgctatttaaatagggtggatagagacgattggtggctgaatagagct

SEQ ID NO: 738 - DNA, 601 bp, Human
aggagaatcacttgaacccaggaatcacttgaaggcagaggttgcagtgagccgagatcatgccattgcactccagcctgggcaacaagagtgaaactccatctcaaaaaaaaaaaaaaaaaaaagctgggcgcagtggcgtgtgcctgtaatcccagctcctagctactcaggaggctgaggcaggagactaacttgaacccggaggcggaggttgcagtgagccaagatcgcaccactgcactccagcctgggcgaggaagagagattctgtctcaaaaaaaaaaaaaaaaaaaaaaaagaaaaagaaaattgacagtagtgaatgctatgaagaaataaatcaggataaaggcatagagaatgacttacagtggtgctatttaaatagggtggatagagacgattggtggctgaatagagctattgaataatgagaaggaatcaacacgatgggacctatttttaggtctactctttcgattctttttaattttaggtctactctttcacttattctttcaagaaatatttgttgagcacctattatgtgctcaacataattatattattctaggtgctggagatagaacagtaaata

SEQ ID NO: 739 - DNA, 601 bp, Human
agaatgacttacagtggtgctatttaaatagggtggatagagacgattggtggctgaatagagctattgaataatgagaaggaatcaacacgatgggacctatttttaggtctactctttcgattctttttaattttaggtctactctttcacttattctttcaagaaatatttgttgagcacctattatgtgctcaacataattatattattctaggtgctggagatagaacagtaaataaaacagacaaaacccccagcccccatggtgcttactttttttttttttggtagggaagcraaaaataaacttcacaaataagtcaaatggatggtatgttagtggaaatgctaaggcaaaaaaaggaagaaagggatgtagaatatgtgtgagtgtgcgtgtgggcgtgaacgggtgacggtggcttctgtttaagatacagtgcccaagaaaggcttacctagaagatgacgtttgaaggaagtagaggcagttatggaggcggcaatgggcaagatggttcaaaaagagggataagcaagtgcagcggccctgagctggagcgtacctgtgagctggcatgaagccttcagggagagt

SEQ ID NO: 740 - DNA, 601 bp, Human
taggtctactctttcgattctttttaattttaggtctactctttcacttattctttcaagaaatatttgttgagcacctattatgtgctcaacataattatattattctaggtgctggagatagaacagtaaataaaacagacaaaacccccagcccccatggtgcttactttttttttttttggtagggaagcaaaaaataaacttcacaaataagtcaaatggatggtatgttagtggaaatgctaaggcaaaaaaaggaagaaagggatgtagaatatgtgtgagtgtgcgtgtgggygtgaacgggtgacggtggcttctgtttaagatacagtgcccaagaaaggcttacctagaagatgacgtttgaaggaagtagaggcagttatggaggcggcaatgggcaagatggttcaaaaagagggataagcaagtgcagcggccctgagctggagcgtacctgtgagctggcatgaagccttcagggagagtggagggagataagataatgtgtgtgtaggggtggatggatcctatggggcccagcaggtcattgtaaggcgtcggcattcatttagagatgagacgccactagaga

SEQ ID NO: 741 - DNA, 601 bp, Human
cataattatattattctaggtgctggagatagaacagtaaataaaacagacaaaacccccagcccccatggtgcttactttttttttttttggtagggaagcaaaaaataaacttcacaaataagtcaaatggatggtatgttagtggaaatgctaaggcaaaaaaaggaagaaagggatgtagaatatgtgtgagtgtgcgtgtgggcgtgaacgggtgacggtggcttctgtttaagatacagtgcccaagaaaggcttacctagaagatgacgtttgaaggaagtagaggcagttatrgaggcggcaatgggcaagatggttcaaaaagagggataagcaagtgcagcggccctgagctggagcgtacctgtgagctggcatgaagccttcagggagagtggagggagataagataatgtgtgtgtaggggtggatggatcctatggggcccagcaggtcattgtaaggcgtcggcattcatttagagatgagacgccactagagatatgagcaggagtggcctgattatgttttattcggattgctctagctgtgttttaattaaaactattttataaagagaggaaaaaacaattt

SEQ ID NO: 742 - DNA, 601 bp, Human
aaccaccttgggcacatgttctcaggatctcttgagactgtaccttgggccttggtcatttatatttgactcagaataaacctctttaaatattttacagagtctgactcttttcatcaacagctggaatatttgtttcttgatctaatgatgattacacagcagttttaagtttgtgcaagtttatttggttttatacttacaatatatacactcaataaaatatgatatacctcaataaaaataaagcaatgccttccctgcctccaaaaacaaaaccaacctgggaatacaaagatcmaataacagtgcctgcagaagcttagaaaatcggcacagatgtgacatttgactcagttcagcacacattatggagggttactatacaagggagactgcacacagagaccatactcaggagcctgaggatcctgaatcactgacctagagggaagaagtaccagcccctatcttgaggacctcatattacaaggcagtaatagacatgcaaaaattaatagcaacagtctgattctggcaattggctgatatgccaactcttaccacttttcaacattgtgctagatatgtaagtggcaga

SEQ ID NO: 743 - DNA, 601 bp, Human
aaaaaatcaattgctttcctaaacaccagtactaactaattagaaaatgcactgggcacagtggcttaagccaataatcccagcattttgggaggctgaggtgggaggatcacttgagcccaggagttcgagacctgcctgagcaacatagcaagaccctgtctctgaaaatgcaattttccaaattttcaataggaacaattacataaatgattataatatatatatataattttatatatacacatctatatctgatgttataaagatgtgcaatacttggagaaaaatttcaaaaatkttttgctgggtatataagctctaaatatataaaaagatatactatatttaaatactaagggataaagtattaagcattcaatgaatactggaaaaatgattggatgagttcatattggacagagccacatctcggtcttcttttggaatcctttcttcatatagtacctagaatagtgcctgacactgtgggaaaccaaaatatgtcacctcaaaatatacttctttggcgtattttcagttggttattcagagaagtagcagacaggaatagttctgaaaagctgttcttttgggggta

SEQ ID NO: 744 - DNA, 601 bp, Human
aaaatcaattgctttcctaaacaccagtactaactaattagaaaatgcactgggcacagtggcttaagccaataatcccagcattttgggaggctgaggtgggaggatcacttgagcccaggagttcgagacctgcctgagcaacatagcaagaccctgtctctgaaaatgcaattttccaaattttcaataggaacaattacataaatgattataatatatatatataattttatatatacacatctatatctgatgttataaagatgtgcaatacttggagaaaaatttcaaaaatttkttgctgggtatataagctctaaatatataaaaagatatactatatttaaatactaagggataaagtattaagcattcaatgaatactggaaaaatgattggatgagttcatattggacagagccacatctcggtcttcttttggaatcctttcttcatatagtacctagaatagtgcctgacactgtgggaaaccaaaatatgtcacctcaaaatatacttctttggcgtattttcagttggttattcagagaagtagcagacaggaatagttctgaaaagctgttcttttgggggtaga

SEQ ID NO: 745 - DNA, 601 bp, Human
aatcctttcttcatatagtacctagaatagtgcctgacactgtgggaaaccaaaatatgtcacctcaaaatatacttctttggcgtattttcagttggttattcagagaagtagcagacaggaatagttctgaaaagctgttcttttgggggtagatttgcatctgtagaggaaatctgcattggtgaggtaaagaacagacacagaggctttctctgaggtccacctatctggatcaggaaaaaggaactcaataagaaaaggagactaaagacctgatacttttttttttttttttttwttatactctaagttttagggtacatgtgcacattgtgcaggttagttacatatgtatacatgtgccatgctggtgcgctgcacccactaatgtgtcatctagcattaggtatatctgccaaggctatccctcccccctcccccgaccccaccacagtccccagagtgtgatattccccttcctgtgtccatgtgatctcattgttcaattcccacctatgagtgagaatatgcggtgttaagacctgatacttttaaagtttggacagtgaaacttttgctgcatctcttccttctgagg

SEQ ID NO: 746 - DNA, 601 bp, Human
ttaactgaatagagttttttttttttaaacagcaaatctttcaatgtattagcaattttaagtaagaatctctaacttgtaacacacactgaacttagagttttgttttttttctacacatgccatttctgcaagtgaacttaagaaatttcaactaatatagaagacttaatcaattctcaattacatgttgtaaattaacctgctaacaggaacaggtgaaactctcttaacattttaaggacataaagtaatcaaatatgcagatttaacacaaaaccattaatattatggggttctyttcaatatttctatgcttaattttaaatcttttttaggataaaattgttttccaactaagaaaagtattgtcatcctattttgtgagataccactaagtcaaatgagattgcgtaatgaccagagatattattagttgaggtgctgactgtatttttatctgatataccaatgagtcttttcacttgggtaaatatgtaggagctggatttctgagttgaatggtaagtctgtttttaactttgtactaaactgggattttgttttccaaagtggctgtacaattttgcattccaaccaa

SEQ ID NO: 747 - DNA, 601 bp, Human
gaatctctaacttgtaacacacactgaacttagagttttgttttttttctacacatgccatttctgcaagtgaacttaagaaatttcaactaatatagaagacttaatcaattctcaattacatgttgtaaattaacctgctaacaggaacaggtgaaactctcttaacattttaaggacataaagtaatcaaatatgcagatttaacacaaaaccattaatattatggggttcttttcaatatttctatgcttaattttaaatcttttttaggataaaattgttttccaactaagaaaaktattgtcatcctattttgtgagataccactaagtcaaatgagattgcgtaatgaccagagatattattagttgaggtgctgactgtatttttatctgatataccaatgagtcttttcacttgggtaaatatgtaggagctggatttctgagttgaatggtaagtctgtttttaactttgtactaaactgggattttgttttccaaagtggctgtacaattttgcattccaaccaacaatgtatgagagtcctagttctgcatgctcatcagtaaatagaattgtcagttgttaaatttta

SEQ ID NO: 748 - DNA, 601 bp, Human
taaatattggcctactcagattatttattgattcttgtgtgagttttggcagattatgtctttcaaaaaattggtccatttcatctaggttatcaaattaaatttgtggtcataaagttgttcatagttgtccattattatcccgttagtgtccgtgggatctgtaatgatgttccctctatcctttcttgctttgttgttgttgttgtttttgagatggagtcttggtctgtcgcccaggctggagtgcagtggtgctatcttggctcactgcaacctccacctcccaggttcaaacgaytctcttgcctcaacctccccagtagctgggattacaggtgcccaccaccaagcccagctaatttttgtatttttagtagagctagggtttcactatattggtcaggctggtctcgaactcctaacctctagcgatccacctgccttggcctcccaaaggcgtaagccactgcacctggcctcatttctgatattaggaatttgtgtcatctttttgtttttcttggttatcctagctagaggcttagtggttttatttatcttttttttttttttttttgctgaggttttattttggaaa

SEQ ID NO: 749 - DNA, 601 bp, Human
ttttttccttcatttcaactttggtgaatctgacaattatgtgtcttggagttgctcttctcgaggagtatctttgtggcgttctctgtatttcctgaatctgaatgttagcctgccttgctagattggggaagttctcctggatgatatcctgcagagtgttttccaacttggttccattctccccgtcactttcaggtacaccaatcagacgtagatttggtcttttcacatagttccatatttcttggaggctttgctcgtttctttttattcttttttctctaaacttcccttctcrcttcatttcattcacttcatcttccatcgctgataccctttcttccagttgatcgcatcggctcctgaggcttctgccttcttcacgtagttctcaagccttggttttcagctccatcagctcctttaagcacttctctgtattggttattctagttatgcattcttctaaacttttttcaaagttttcaacttctttgcctttggtttgaatttcctcccgtagctcgtagtaatttgatcgtctgaagccttcttctctcagctcgtcgaagtcattctctgtccagctttgttccgt

SEQ ID NO: 750 - DNA, 601 bp, Human
ccctttcttccagttgatcgcatcggctcctgaggcttctgccttcttcacgtagttctcaagccttggttttcagctccatcagctcctttaagcacttctctgtattggttattctagttatgcattcttctaaacttttttcaaagttttcaacttctttgcctttggtttgaatttcctcccgtagctcgtagtaatttgatcgtctgaagccttcttctctcagctcgtcgaagtcattctctgtccagctttgttccgttgctggtgaagaactgcattcctttggaggaggagmggtgctctgctgtttagagttcccagtttttctgctctgtttttccccatctttgtggttttatgtacttttggtctttgatgatggtgatgtacagatgggtttttggtgtggatgtcctttctgtttgttagttttccttctaacagacaggaccctcagctgcaggtctgttggagtacccggccatgtgaggtgtcagtctgcccctgctggggggtgcctcccagttaggctgctcgggggtcaggggtcagggacccacttgaggaggcagtctgtccgttctcagatctccag

SEQ ID NO: 751 - DNA, 601 bp, Human
tttcttccagttgatcgcatcggctcctgaggcttctgccttcttcacgtagttctcaagccttggttttcagctccatcagctcctttaagcacttctctgtattggttattctagttatgcattcttctaaacttttttcaaagttttcaacttctttgcctttggtttgaatttcctcccgtagctcgtagtaatttgatcgtctgaagccttcttctctcagctcgtcgaagtcattctctgtccagctttgttccgttgctggtgaagaactgcattcctttggaggaggagaggygctctgctgtttagagttcccagtttttctgctctgtttttccccatctttgtggttttatgtacttttggtctttgatgatggtgatgtacagatgggtttttggtgtggatgtcctttctgtttgttagttttccttctaacagacaggaccctcagctgcaggtctgttggagtacccggccatgtgaggtgtcagtctgcccctgctggggggtgcctcccagttaggctgctcgggggtcaggggtcagggacccacttgaggaggcagtctgtccgttctcagatctccagctg

SEQ ID NO: 752 - DNA, 601 bp, Human
ttggttattctagttatgcattcttctaaacttttttcaaagttttcaacttctttgcctttggtttgaatttcctcccgtagctcgtagtaatttgatcgtctgaagccttcttctctcagctcgtcgaagtcattctctgtccagctttgttccgttgctggtgaagaactgcattcctttggaggaggagaggtgctctgctgtttagagttcccagtttttctgctctgtttttccccatctttgtggttttatgtacttttggtctttgatgatggtgatgtacagatgggttttyggtgtggatgtcctttctgtttgttagttttccttctaacagacaggaccctcagctgcaggtctgttggagtacccggccatgtgaggtgtcagtctgcccctgctggggggtgcctcccagttaggctgctcgggggtcaggggtcagggacccacttgaggaggcagtctgtccgttctcagatctccagctgcgtgctgggagaaccactgctctcttcaaagctgtcagacagggacatttaagtctgcagaggttactgctgtctttttgtttgtctgtgccctgcccccagag

SEQ ID NO: 753 - DNA, 601 bp, Human
ttcctttggaggaggagaggtgctctgctgtttagagttcccagtttttctgctctgtttttccccatctttgtggttttatgtacttttggtctttgatgatggtgatgtacagatgggtttttggtgtggatgtcctttctgtttgttagttttccttctaacagacaggaccctcagctgcaggtctgttggagtacccggccatgtgaggtgtcagtctgcccctgctggggggtgcctcccagttaggctgctcgggggtcaggggtcagggacccacttgaggaggcagtctgtycgttctcagatctccagctgcgtgctgggagaaccactgctctcttcaaagctgtcagacagggacatttaagtctgcagaggttactgctgtctttttgtttgtctgtgccctgcccccagaggtggagcctacagaggcaggcaggcctctttgagctgtggtgggctccacccagttcgagcttcctggctgctttgtttacctaatcaagcctggacaatggtgggcgcccctcccccagccttgctgccgccttgcagtttgatctcagactgctgtgctagcaatcagtgagac

SEQ ID NO: 754 - DNA, 601 bp, Human
ctggcttaaacagttacttatgtgataatcaaacttcccttgctgatataaaagtttttatgtattcttggtttgatcactcctaatttgtctgcatgcaaggagaaccagacttaaggtaggatccactcatttactgactgattgcttattgaatgccttctctgtgctggacagtaggagtaagatgaggagcactgtggactttgtccctgccctcatacatttatgataaggggttgtggggtcagggcatggaaaaaacaaaaggcaaatctttaagacaaactgattggaaackactgctattggttaaatacacccacatgttgagataatttgtactttcccaaaacattatcttgataacattatagtcccagaaagcgttagggaatgtagtaatgaaactttggcaggtcttgtgcctctacaatgtttgtgttgctcatgacctttgtacatgaatgcttttgcccatgtggccagtcaaaaaatgacctggttgacctgtttttccaaaagacctttgaccaaatctttgatggacaaacagagaatcatgttttcaagaaggatctacttgcaagcaaagttctat

SEQ ID NO: 755 - DNA, 601 bp, Human
ggcaggtcttgtgcctctacaatgtttgtgttgctcatgacctttgtacatgaatgcttttgcccatgtggccagtcaaaaaatgacctggttgacctgtttttccaaaagacctttgaccaaatctttgatggacaaacagagaatcatgttttcaagaaggatctacttgcaagcaaagttctatagtgtagtcagggaaggctctatgaagtaatgaactcttctggcaaagatctgaaggatgagtagaaaatagtctggtcatgagctaggggaagtgatttacaggcaggagtarcatgtggaatacagaataatttgactttaataaatttcaaatggtaaaaattttccaaagttcaaaatagaaacataacatcccgtgatattagaaaatctcattactttactttagtctggccagaaatgtgtcaagaggaagacttcaaagaggtagatttcatctctctggcctgtaaacaaaatgcccaaaacacttccccaaggcttaaagtcagtttgtaattactcttttcatcacctcagaagaatttccaaactttagtaacgtagtaaaattttttttggcctttgtgaa

SEQ ID NO: 756 - DNA, 601 bp, Human
tcattactttactttagtctggccagaaatgtgtcaagaggaagacttcaaagaggtagatttcatctctctggcctgtaaacaaaatgcccaaaacacttccccaaggcttaaagtcagtttgtaattactcttttcatcacctcagaagaatttccaaactttagtaacgtagtaaaattttttttggcctttgtgaataaatactatgaaatttggttcaaaagataaagcaaagagcaactgaggtcttcaaaacatcatgtatctagaaggtattaccaaacatccgttttttttwaaaaagcataaggcataaaatcaattcactaatgtcatgctagagtgaggtagtaaaatgaggcaactcagaccagatggtgtaattcataaacagggctgtcatttgggaaaacgggtggagtggatggagaaattaacttgcagtctttccccttccatttcttcccaatccaactaaccttattcctctgggtcatttagctgtggctaaaacacacacacacacacacacacacacacacacacgtgtgtatatatataatatatatataatatactttttacttatagccatagg

SEQ ID NO: 757 - DNA, 601 bp, Human
tccccttccatttcttcccaatccaactaaccttattcctctgggtcatttagctgtggctaaaacacacacacacacacacacacacacacacacacgtgtgtatatatataatatatatataatatactttttacttatagccataggtaaatggtgaatgaagtagatgattgacctgtgtgcatagcacacagcattgctatttgatgtttgatgaaatatcaatgctctcagaataaataattaaatgagtgtatatatatagacacacacacacacacacacacacacacacacctatatttcttttttaaaagagtgtaattgatgccaaagccactttctcttcagagctgcttaactacatgaagagtgtgcaccaacctggggttgcaaagagttctctaccttgtccggcttctggaaaggatgtgcgctttgctcaatggggaatggataagatgaggatgtcccactgctggttggttagtacatttttgtagatgaagcaaagcacatctgttcttatacagaatctcatctttaaaagggacctcagatagcatctaattcaaaaactcatctaatgcagtgcagt

SEQ ID NO: 758 - DNA, 601 bp, Human
gccactttctcttcagagctgcttaactacatgaagagtgtgcaccaacctggggttgcaaagagttctctaccttgtccggcttctggaaaggatgtgcgctttgctcaatggggaatggataagatgaggatgtcccactgctggttggttagtacatttttgtagatgaagcaaagcacatctgttcttatacagaatctcatctttaaaagggacctcagatagcatctaattcaaaaactcatctaatgcagtgcagtattcctctaagatacatacataaatgctggctaaatgyccccagggatggaagtttactgcctcacaaggcagccaattatctttctgacaggtgccattcttcctaatactgaggtaaagtccattgttctttagcttccacaaaaagcagtgataatactcttgacggcttgccctgtgccagggtctgtgccaaggagcttcatatgcattgtttgtaacacttgcaacattagtggcaggcagggatcatcctgcacattttacaggtgagggaactggcacaaggtcacacagctaagagagaaggatctagtctggctaaatccaatgccta

SEQ ID NO: 759 - DNA, 601 bp, Human
cagctcttcatccctttagagtagcttttatagttacttgggccattttgggtagtggacattggattactatttttgttcaaccaaataaatggaaggcttcttagtattattaatgctcaaaacatgcaacccacactcctattatgcaattgaatattgttttgaagtcatcctgtaattacaagatttccttccaaatcagacaataggtctgaaagtagtaattttgacctaaatatgtgcaagagcttgaagggcttcttataaaaactaagaggaagaccaagtttagtggaaraacacccaggctaggatttgggagacctgggtcccactgacatctctgccaattattggctctccaagtccccctttggttgggtaatggggccgtccatcctaactcactctattatgtggaatataaatatgggaatcacaatgaaaactgtaaaattatattacatctaaaaggctgccatgttttcttaaacactggttaattatggtaggtagaaagaggtcttttgaaggcttttagagctcattttcccaaattgttttgtgtggacctctgcttcagggagatgtatttagt

SEQ ID NO: 760 - DNA, 601 bp, Human
cctttctaaaagtgctttctaagacagagtacatatttcctgatcttctgtatatccgtcatcaaactcaactgtcatcttcttaatgccaggtagatactaaaccacaaatcctccaaaacaactgggcagaaagtagaagacaatcagcagcattcactgctttctaagaaggcaattcccaggaatacagtcctgaaggtttaagttgaaaaagaaacttgatcttagtaggtatgtaatcagtttagctcactaaaaacaaaacaaaacaagacaaaaaacaaacaaacaaacaaaaaaaaaaacaactctgtcaggtggaaggaacgtgaaacgtgttaacccatgaaaaacagaagcaggccagaaggaagccagctagaatctagggtttagaatgcgagcagtgcctgtcaatctacccttcagttctagatttgagaaaagtagtcaaccaccacaccaatggacaatgagcaggaccaacagaaactccatccacctacctattgaaaacctggagctttaataggtcttgccttgttcaagaagtagagaagaaaaataaaacaattcctatggtagaaaaaaaaaagat

SEQ ID NO: 761 - DNA, 601 bp, Human
cagcctgggtgacagagtgagactctgtctcaaaaaaaaaaaaaaaaagtaaatgtggaaggtaaaagtctacaaagggagtatctgtgacttggggcagggaaatattgcttagacaaaacacaaagcgcacaaaccataaagagaaagattggtaaatttgagcacattaagaacctctgttcatcaggagacactgtaaggacagcagaaagcagacttggagaatgttgtgtgtgtgtgcgtgtgtgtatctagcaaataattagtattcagatatacaaatcaatattgatttttmtacaaatcaataagaaaaagacaataccatggacatgttctcaaactccttagtaatcttggaaatgaaaattaaaacgacaatgtatcaccatttcctacctatcagattggaaaaatacaacctgatattacaaaaaactgttgatgtaggacaatgagaaccttagacaatgatagattcagcatggaattaacctaaaggaataaggcctgtctcctaagtttttgagggagttacgatatcacaacaaccttaggcttgtgtggcatcagcctgtgaatattaacttatatcaag

SEQ ID NO: 762 - DNA, 601 bp, Human
tctgaaaagtgaccacccatcctacttgtcactatcttcttccttgtttttttttctttataaccttcatcatgactttacattttaaatttttaattttttcccttctctccttttttttttgagataaagtcttgctctgttgtctaggctggagtgcagtggcacagtcatagatcactgcagggtaattttaaattttttgtagaggtagggtcttgttacattgcccaggctggtctcgaacccctagcttcaagagatcctcttgcctcggccttccaaagtgctgggattaaargcaccagtcactgtgcctggcctttacacttttttattgtgtgtttgtatccgtccactaggctactattgcgatacccctagttcccagattacttggcccatagtaggagcttaatatttgtgtaatcaggggacatgaaattccttataagctcttatttaatagaattaacaaaatattttacttctagattttaaaatctaatttactaacatcatttgggaattttgttacatatacatgcctcccacacttttttttttaaaaaagagttcgtttatcacacacttgtttttt

SEQ ID NO: 763 - DNA, 601 bp, Human
aaccttcatcatgactttacattttaaatttttaattttttcccttctctccttttttttttgagataaagtcttgctctgttgtctaggctggagtgcagtggcacagtcatagatcactgcagggtaattttaaattttttgtagaggtagggtcttgttacattgcccaggctggtctcgaacccctagcttcaagagatcctcttgcctcggccttccaaagtgctgggattaaaagcaccagtcactgtgcctggcctttacacttttttattgtgtgtttgtatccgtccactargctactattgcgatacccctagttcccagattacttggcccatagtaggagcttaatatttgtgtaatcaggggacatgaaattccttataagctcttatttaatagaattaacaaaatattttacttctagattttaaaatctaatttactaacatcatttgggaattttgttacatatacatgcctcccacacttttttttttaaaaaagagttcgtttatcacacacttgttttttaaactaatgatttgctttcaagtcagtgttgtcacacgtccaaggttttcctacattctgg

SEQ ID NO: 764 - DNA, 601 bp, Human
ccattaactcttctcaaatgtgagctccatgtggtgaaggaccacatatcatatgtaagcaggtaaattcatgattgagtgaataaatcctgaatgctgctctagtagtggttgtaacgttttaccctgccacacttggccatgacttgttggagaaaaggtaaatatctgatttaatctgggccaatcaaattcctctcctgggtatttggaattaagacctatctctggggagatgagctgaaagttccaacactaaggctgaaagtgaggactagttaaagcctcatggaggctaacrtttctaggagaaccaagagtaacaaagatgagagacacgtgacctcagggagaacatgaggtgggccatatggctgtccagatacctgatggctttccagcccgtggctccagtttccatgatggtcagctgttcttcatttctttgagatctctgaatccttacaataatcaccgtcccaccctgacagaaaaacagagaaacacacacatgtgctgttattgaaggttgcctatgttagttctgttcctaccactctataaaacagtttattcaatctaatataacactaattcttga

SEQ ID NO: 765 - DNA, 601 bp, Human
aacatgaggtgggccatatggctgtccagatacctgatggctttccagcccgtggctccagtttccatgatggtcagctgttcttcatttctttgagatctctgaatccttacaataatcaccgtcccaccctgacagaaaaacagagaaacacacacatgtgctgttattgaaggttgcctatgttagttctgttcctaccactctataaaacagtttattcaatctaatataacactaattcttgactcatattctgcacacagataactaaaacacccagatcttttcacacaaactrcagtttaaccaattgtataatagaatttttggaaagtttgctcattcacccattcattcaacaacaatatattaagcaactactgtatgtgaatggactttttatagtttttactatttgtctgtcagttgtcactttttgctgctgcgaaggatgttgtcttttctttccatttacttattagcagtggaattgagtaatgatgagtaaaataaaagctcgtaagctctgaatgtgggcactacatgatgtttgtcatatctattttgagtgtggaaagaacattttgcctactgtctg

SEQ ID NO: 766 - DNA, 601 bp, Human
tactgtatgtgaatggactttttatagtttttactatttgtctgtcagttgtcactttttgctgctgcgaaggatgttgtcttttctttccatttacttattagcagtggaattgagtaatgatgagtaaaataaaagctcgtaagctctgaatgtgggcactacatgatgtttgtcatatctattttgagtgtggaaagaacattttgcctactgtctgtttccctcttagattctgggttgttgtaggtatagtaagtaaatattggatacttgaattgttatgtgtggttttatatayacatttatatgcatatatcttatataaatttaaatctaaatatatatacatagctaggaaaaaacaaagtaaggttgtaccagagtaaagaaaagttgaccatatttaaataaataaatgtgattacatttacagaccagcagatgtacttgggactgtcacctctgtgtatcttgaataaaactgaaggttaaacttgtcccttcattgggctttaaattaaaaaatttttttttaaaattatcttaggtacataataggtatatatatatttatgggcacatgtgatattttgataca

SEQ ID NO: 767 - DNA, 601 bp, Human
tcagcctcccaagtagctgggactacaggtgcacaccactgtacctggctaatttttgtattttttgagacagggttttcttatgttgcccaggttggtgtcaaactcctgagctcaagcggtctgcttgcctcagcctcccaaagtgctaggattacaggtgtgagccaccatgcccagcctagttattaaaaaatatacaattaattattgttgactatagtcaccctgttgtgctaccaaatactagatcttattcattctatctaagtttatttttgcacctattactcatttccccaccccctaccactcccaccctgctatccttcccagcctctgctaatcatccttctactctctatctcaatgggttcaattgctttaacttttagctcccacatgtgagtgagaacatgagaagtttgtctttctgtgcctggcttatttcaccgaatataatgtcttccagtttcatctatgttgttgcaaatgacaggattttgttcttttttattgctgaataatacttcattatgtatatgtaccacattttctttatttgttcatctgttgatggacacttaggttgataccaaat

SEQ ID NO: 768 - DNA, 601 bp, Human
ataaccctcacaggggatgctgaggaatctggatgcccatggatttttaataatgggagagaatgctatttggaaatcagaggattgaatggatcttggattggatcttgaacacaagactccaactccaaaataaaaactgtgggctgaacaatatgcaattatatatgtggttgtataatgtgcttccatttccttactacaccctaacaaagtctttgttgctggcagggagatcagcctggccttaagaatctgcttctgctagttcagatgggaagtgattagtgtttgtcatatrcttaaaatcctttatgataaatggcacaggcagttattttcgtatgtacacagaatacatcacgaagatcaaagaactctaaccagaggccccatttccagctaacaggtctgagtctatttgggtttagattgtaaaacttcaggaaaatctaacgagcttatgttaccctgaacaagaaatgagatttcttagtaatacccactattgctaagtgactattaaggtagccaaatatcattctttacctatgctttagtttaaaatttcaaagagaggtatggtcagatttatccatgt

SEQ ID NO: 769 - DNA, 601 bp, Human
accctaacaaagtctttgttgctggcagggagatcagcctggccttaagaatctgcttctgctagttcagatgggaagtgattagtgtttgtcatatgcttaaaatcctttatgataaatggcacaggcagttattttcgtatgtacacagaatacatcacgaagatcaaagaactctaaccagaggccccatttccagctaacaggtctgagtctatttgggtttagattgtaaaacttcaggaaaatctaacgagcttatgttaccctgaacaagaaatgagatttcttagtaataccmactattgctaagtgactattaaggtagccaaatatcattctttacctatgctttagtttaaaatttcaaagagaggtatggtcagatttatccatgtgttcaatatctaagattttgtcttttaagggaaagcgctttctcctctgattttctgcctaggggaacctcaaggtatctatggcgtaaaagccaaacgtctgttttagcaaatagccagacattacagtggggagtatgtagatcatcttgattattttaccaaccatcagggcagagatggaaacattgtgagctgggaac

SEQ ID NO: 770 - DNA, 601 bp, Human
cagctaacaggtctgagtctatttgggtttagattgtaaaacttcaggaaaatctaacgagcttatgttaccctgaacaagaaatgagatttcttagtaatacccactattgctaagtgactattaaggtagccaaatatcattctttacctatgctttagtttaaaatttcaaagagaggtatggtcagatttatccatgtgttcaatatctaagattttgtcttttaagggaaagcgctttctcctctgattttctgcctaggggaacctcaaggtatctatggcgtaaaagccaaacrtctgttttagcaaatagccagacattacagtggggagtatgtagatcatcttgattattttaccaaccatcagggcagagatggaaacattgtgagctgggaacattgagtttcatttttaccagtatccttgccttttagaaggtatctgttaggagtacttaaagtaaaatggattgtttctaaaattgtgagatgagctatagggcagcttttctacttaattagcttttgtcgttttgtgtttctgttgagaaaagctgagtgggacccaagctatccattcactgcagcatccaa

SEQ ID NO: 771 - DNA, 601 bp, Human
aatagccagacattacagtggggagtatgtagatcatcttgattattttaccaaccatcagggcagagatggaaacattgtgagctgggaacattgagtttcatttttaccagtatccttgccttttagaaggtatctgttaggagtacttaaagtaaaatggattgtttctaaaattgtgagatgagctatagggcagcttttctacttaattagcttttgtcgttttgtgtttctgttgagaaaagctgagtgggacccaagctatccattcactgcagcatccaagttgcttagaatmcttttagaatttagctaagaatactgtttctacccattccaaaaagtatagctagataatttgtaaattcaatttcatgttaattataaacaatttcttgtgctcctttctgtactgtgggtatttaccgagttcaaccatagcttatacctcatatgagaaagattaacaataaaaaatcttttctgtgcacaagtgggggtaaaagactcattatcttctctactttacccccagtgcacccaggctccaaactccagaatcatatattctttctccacttccaatctaatattaaat

SEQ ID NO: 772 - DNA, 601 bp, Human
ataatttgtaaattcaatttcatgttaattataaacaatttcttgtgctcctttctgtactgtgggtatttaccgagttcaaccatagcttatacctcatatgagaaagattaacaataaaaaatcttttctgtgcacaagtgggggtaaaagactcattatcttctctactttacccccagtgcacccaggctccaaactccagaatcatatattctttctccacttccaatctaatattaaatcatgttgatttttgtctcaacaatattttttgtttgtttttaatttttcattaccrttgtcattatcttagcttaggctctcttctttcatgaattaagcttttccttattatgcgtgaagttattaattgaacaaacacttattattcacctactaggtactaggtattagtaggtgggaataacagcaataatcaagataaaaccttatgttgggtacaatcttcttactcaagtcactgaaaagcctttaaataggtcctttatgtattttctctctctactccaaaacattaaaaacataattgcaaaactagttttatgtaatgcttcattatggcctgagatatcctaat

SEQ ID NO: 773 - DNA, 601 bp, Human
tgctccatattccagaatccaatcttgcctggggccaaacccatgccaggctttccctcttttttctcccaaggggatggggtggtcagtcaattatctttatagatatttttttcattaaaattaaaaaattcttaattgtggcaaaagacccataacataaaatttaccatcttaaccatatagttcaatagtgttaagtatattcacattgttgtacaaccaatctgcagaacttttttcatcttgagatctttctttacatttttaagcagtcatttatttacttgttttctcttgyatatcggaccaaaattttcttgaggacaaggctgtgttactgacttgtgtatcttttagtcaaactacctggtataatcaattaataattgtttcatgaatttgaattgaccctggcttccctgatgttctaatctaatgtgcactccacaggaaccctattctgtcaacagacctggattctgatatcaatgaaatagtgcacatcttgaaaacatttccactaatgtaaacaagaaagatgaaagtcaacagagtaagaagttggcacaaggagttgattccgtctgctttggaggtt

SEQ ID NO: 774 - DNA, 601 bp, Human
agagagaattttgaatgttccaaatataaagaaatgataaatgagatgatggatatcacaattaccctgatatgatcattacacattgtatatacttgtatcaaaatatcagatgtatctcataaatatatacaattattatgtgtcaatcaattttttttaaaaagccacaataaagaaaatactttaccccaaagataattatctccttaagagaaaatttgttttaataaaaacttttattttagggccaggtatggtggcacatgcttataatcccaggactttgggaggccaaggyggtgggatggcttgagctgaggagttcgagaccagcctgggcaagttggcgaaaccctgtctctacaaaagaaaaccaaaaacaatagccaggtgtggttgcacgtgcctgtagtccctgccagttgggaggctgaggttggaggatggcttgagcttgggaggttgaggctgtagtgatcaaaccactgcattccagccttggccacagagtaagaccctctctcagaaaacaaaaacaaaaacaaaaaacacttttactttagaattgttttagatctaaagaaaaattacaaagatt

SEQ ID NO: 775 - DNA, 601 bp, Human
cctttctatcacattcctgacaaatagtaacatctgcttaaatacttccagtgactggcaacccagtatgtcttaatgagccccattgccagataactctagagcagtgtgacttgagatgtagtcctaggaccagcagcagcatccatacaacctgggagctgcttagaaatgaagagtctcagatctcattccagacctgaattagaatctacattcaacaggatctccaggtgattcatgtgcacatccaaatttgaaaagtattgctctagtgttcatatacatatatatatatattcacacacacacatatatgtatttttcccaaaagatggcaaccaaggtcttgcaatcacattgccccattcattaatttatctgtgtattcacaaaacatttcttaagagcatattatgtgatttaatttgaattttttttagaaaaaattatccctaccctaaaaattttcacattccagtcctgtcatgcaaaaggtagttgaatgaacagggtaatttttattcagaaaagagaggactaagtttgaagagctgaccctgaaagaaaagcaaattcagaaaaattcaggaaaagctta

SEQ ID NO: 776 - DNA, 601 bp, Human
ttcctgtatttgctcttctctcaggcacagctcttcaaacttagtcttctcttttctgaacaaaaattaccctgttcattcaactgccttttgcatggcaggactggaatgtgaaatttttgagagtagggataaggtcttatttaaaaaaaattcaagttaaatcagtgcttagcaatcatatgttcttaagaaatgttttgtgaatacacagatgaataaatgaatggggcaatgtgattgcaagaccttgcttgacatcttttgaaaacatcttagtgcgttactgtcccctgtcccwgataaaatgtggcatcatgaattgagcagaatactccatatggtgtatgaatattgtaggatagtggtataattaatttccctaatttagaatttactttttgatgagttcagcctaataaagatgaaagagaatatgacccccatcattatggcggtctgtgtttagaaggccaaaatagacccctacaacgttgacttagcttatcagtaaggtagaatttgctttaaatggcaattttgagatttttcttgaggagctgaaaggctttacaagattaggaaggtcccccactggcta

SEQ ID NO: 777 - DNA, 601 bp, Human
tcattcatgtatgtctcaagggtaaatggccatcagcgagtctctgacagagaaatactaagtgatcctagtctaaaaggaaagccaatgtgcacttgagtagcagcattcactttacagagagttcaaagggcactttactatgtctaaatgccctttatgttctctggtgccagcaggaaaaggaaagctattaaatgcttataagagtgagacactgtattttaggacataggaaagatggggggaaatagatggcaaactaattgtaagtcaagaatatagcgagtttcccaaagacaattcctgcattttcaaaatattcttcttttttaagggtgtgtggggtgggtggcgtaaaatggaaaaatatgtaaagcctcatttaatatgttttctgaataatccaaaattttcaacatgagctgtaggttgggttgggttggggcaaatcgatgaggcaggagcctaaaattataccaaatttctggatataaatatcagccccaccattattagatatgtgaattccgggaagatacttaatgtctttgagtcccagccttcacgagtatacaattaggaggataaattccaccac

SEQ ID NO: 778 - DNA, 601 bp, Human
aaatgagcagagattgtaagactaaagggaaaaataattgtatgtaagcacggtaatctagttgataaagtctcccatgggggaacaggttaacaattctgaaaccatcatacatctaatctggaactgaagaattaagtaaatggaatgtggatagcaggaagcacgagccaggtttctcactgttgaagtgggagcttacaggaaagcatggggagaaggcaagaatgattcatatggttatggattagagttagagacatcagtatgaactcatgcttacattattataggtacagaygtttacatatagaaatatttatagatacgtatatatactgaagttagctacacacacacacacacacacacacacacacacacattttgctctgtcagctgaagaggtcaagatacaaggatacacctaacaagtcagatctttgtttctaatactatttgttccaataaaaggaaccagggatccttagagagacggctgattctcaggaagcatacaatataagtctggagcatgttgtagtttcttaaaagaaagaagtacttaatacccacaatgatggagcacatcaaagggaga

SEQ ID NO: 779 - DNA, 601 bp, Human
acaggttaacaattctgaaaccatcatacatctaatctggaactgaagaattaagtaaatggaatgtggatagcaggaagcacgagccaggtttctcactgttgaagtgggagcttacaggaaagcatggggagaaggcaagaatgattcatatggttatggattagagttagagacatcagtatgaactcatgcttacattattataggtacagacgtttacatatagaaatatttatagatacgtatatatactgaagttagctacacacacacacacacacacacacacacacacaccttttgctctgtcagctgaagaggtcaagatacaaggatacacctaacaagtcagatctttgtttctaatactatttgttccaataaaaggaaccagggatccttagagagacggctgattctcaggaagcatacaatataagtctggagcatgttgtagtttcttaaaagaaagaagtacttaatacccacaatgatggagcacatcaaagggagactagagccaatgtaagcagttcctaatggcctacgctgggacgatttgagcaataagataaataaggtagcaatggattatgat

SEQ ID NO: 780 - DNA, 601 bp, Human
ctggaactgaagaattaagtaaatggaatgtggatagcaggaagcacgagccaggtttctcactgttgaagtgggagcttacaggaaagcatggggagaaggcaagaatgattcatatggttatggattagagttagagacatcagtatgaactcatgcttacattattataggtacagacgtttacatatagaaatatttatagatacgtatatatactgaagttagctacacacacacacacacacacacacacacacacacattttgctctgtcagctgaagaggtcaagatacaagratacacctaacaagtcagatctttgtttctaatactatttgttccaataaaaggaaccagggatccttagagagacggctgattctcaggaagcatacaatataagtctggagcatgttgtagtttcttaaaagaaagaagtacttaatacccacaatgatggagcacatcaaagggagactagagccaatgtaagcagttcctaatggcctacgctgggacgatttgagcaataagataaataaggtagcaatggattatgattcaggtatatatacaataaatattcctgtctacact

SEQ ID NO: 781 - DNA, 601 bp, Human
agaagttgtcatagccaagagcagtctacggtggcatgcgactgcaagtaatgcagcaccctggttgggatactggaacagaaaaatagtgtgaggttaataactactaaaatatgaataaagtatggacattaattaaaaattatgtaccaatattggttcattggttatgaccaatgcacctcacttatataggatagaaataataggggagattgggtgtgaagtatatgggaattctactatctttatcacttttctgagcatctaaatcttttaaaataaataaaaagtttatttwaaaaaatctcattccaagttttaccccattccaattaaatcagaatttctagggtgtgagaagggatcagtattttttaaacatctcaagtgctgtcaacgtgcagcactggaaacctctgtagtagaagtccctgagctgtggtagctgttatattttggtactccttaattcatacaaaatgtcctgagctaaatgaaaatgttgtgtgttgcctccattttgtacctatgtgaagtcaaaattttaattatgagtatgataaaaataaagtactggaacatgttgcccatttgagca

SEQ ID NO: 782 - DNA, 601 bp, Human
ataactactaaaatatgaataaagtatggacattaattaaaaattatgtaccaatattggttcattggttatgaccaatgcacctcacttatataggatagaaataataggggagattgggtgtgaagtatatgggaattctactatctttatcacttttctgagcatctaaatcttttaaaataaataaaaagtttattttaaaaaatctcattccaagttttaccccattccaattaaatcagaatttctagggtgtgagaagggatcagtattttttaaacatctcaagtgctgtcarcgtgcagcactggaaacctctgtagtagaagtccctgagctgtggtagctgttatattttggtactccttaattcatacaaaatgtcctgagctaaatgaaaatgttgtgtgttgcctccattttgtacctatgtgaagtcaaaattttaattatgagtatgataaaaataaagtactggaacatgttgcccatttgagcaccacttgatgttacactattggatattgagctcctaactgacaaatgtatcaagcatataattacaagcaatattacatcttaaaatgtctcgtaattt

SEQ ID NO: 783 - DNA, 601 bp, Human
ctcacttatataggatagaaataataggggagattgggtgtgaagtatatgggaattctactatctttatcacttttctgagcatctaaatcttttaaaataaataaaaagtttattttaaaaaatctcattccaagttttaccccattccaattaaatcagaatttctagggtgtgagaagggatcagtattttttaaacatctcaagtgctgtcaacgtgcagcactggaaacctctgtagtagaagtccctgagctgtggtagctgttatattttggtactccttaattcatacaaartgtcctgagctaaatgaaaatgttgtgtgttgcctccattttgtacctatgtgaagtcaaaattttaattatgagtatgataaaaataaagtactggaacatgttgcccatttgagcaccacttgatgttacactattggatattgagctcctaactgacaaatgtatcaagcatataattacaagcaatattacatcttaaaatgtctcgtaattttcctccaattgaaatgaaaaaaagaaaaaaggatatgacatgcatactctttcctctgtctgatccctatgctgtctgatccc

SEQ ID NO: 784 - DNA, 601 bp, Human
tgttcacagatccagcgctgttaactttatactagtctaagtcttttttcttataaataattacaaaagctcattaagcaatacagactgggaactttttttttcctccaaattctagtttatttttaattgacaaatagtaattttataaatttatgggggtacaatatgatattctgatacatgtatactctgtgggatgatcaaatcaggctaattagcattatcagtcatttcaaatatttatcatttctttgtggtgagaacacttaaaatcctctcttagagattttgaaatatrcaatacattattattgcagtcagtatgctgtccaatagaacaccagaacttattcctaactgaaacttcgtatcagctgaacaatatctctcctttccctgtccacactctcacccactgccagcctttggttaccacctttttactctctgtttctatgagtttgactttttaagattccacataaaagtggggtatttgtctagccacgcctggcttatttcattttttttgagaccaagtcttgctctatcgcccaggctggagtgcagtggcgcaatcttggctcactgcaacctc

SEQ ID NO: 785 - DNA, 601 bp, Human
tagtctaagtcttttttcttataaataattacaaaagctcattaagcaatacagactgggaactttttttttcctccaaattctagtttatttttaattgacaaatagtaattttataaatttatgggggtacaatatgatattctgatacatgtatactctgtgggatgatcaaatcaggctaattagcattatcagtcatttcaaatatttatcatttctttgtggtgagaacacttaaaatcctctcttagagattttgaaatatgcaatacattattattgcagtcagtatgctgtmcaatagaacaccagaacttattcctaactgaaacttcgtatcagctgaacaatatctctcctttccctgtccacactctcacccactgccagcctttggttaccacctttttactctctgtttctatgagtttgactttttaagattccacataaaagtggggtatttgtctagccacgcctggcttatttcattttttttgagaccaagtcttgctctatcgcccaggctggagtgcagtggcgcaatcttggctcactgcaacctctgcctcctgggttcaaacgatcctcctgcttc

SEQ ID NO: 786 - DNA, 601 bp, Human
gcaatacagactgggaactttttttttcctccaaattctagtttatttttaattgacaaatagtaattttataaatttatgggggtacaatatgatattctgatacatgtatactctgtgggatgatcaaatcaggctaattagcattatcagtcatttcaaatatttatcatttctttgtggtgagaacacttaaaatcctctcttagagattttgaaatatgcaatacattattattgcagtcagtatgctgtccaatagaacaccagaacttattcctaactgaaacttcgtatcagstgaacaatatctctcctttccctgtccacactctcacccactgccagcctttggttaccacctttttactctctgtttctatgagtttgactttttaagattccacataaaagtggggtatttgtctagccacgcctggcttatttcattttttttgagaccaagtcttgctctatcgcccaggctggagtgcagtggcgcaatcttggctcactgcaacctctgcctcctgggttcaaacgatcctcctgcttcagcctcccaagtagctgggattacaggcacccgccaccacgcctg

SEQ ID NO: 787 - DNA, 601 bp, Human
atgccctctaggttcattcatattgtcccaaatgacagagttttttaaaatgctgaatagtattccattgtgtgtgtgtgtgtgtgtgtgtatatatatatatacacatatatatgtatatatgtgtgtgtatatatatatacatatatatgtgtatatatatgtgtgtatatatatatatacacacacacacaacattaaaaaaaatccattcatttgttgatgaacacttaggttgtttccatatcttggctactgtgaataatgctgcaatgagcataggagtgcagacatctctttracatatgatttcaattcttttgcatatacccagaggtagaatttctagatcataaggtaaatctatttttagttttcatatttttaaaacttcatactgtttttcaaaattgttttcaaaattgctgcacttaattgtaataccaccaacagtgtacaagggttccttctccacatacttgctaatacttatctttcgaaatagctgatctaacaggcatgaggtgatatcccattgtagttttaatatgcatttctctgataattagaaatgttgagcattttggtaaatgtatgtctt

SEQ ID NO: 788 - DNA, 601 bp, Human
gtgtgtgtgtgtgtatatatatatatacacatatatatgtatatatgtgtgtgtatatatatatacatatatatgtgtatatatatgtgtgtatatatatatatacacacacacacaacattaaaaaaaatccattcatttgttgatgaacacttaggttgtttccatatcttggctactgtgaataatgctgcaatgagcataggagtgcagacatctctttgacatatgatttcaattcttttgcatatacccagaggtagaatttctagatcataaggtaaatctatttttagttttyatatttttaaaacttcatactgtttttcaaaattgttttcaaaattgctgcacttaattgtaataccaccaacagtgtacaagggttccttctccacatacttgctaatacttatctttcgaaatagctgatctaacaggcatgaggtgatatcccattgtagttttaatatgcatttctctgataattagaaatgttgagcattttggtaaatgtatgtcttggccatttgtatgtcttctcctgagaaatgtctatggaaattctttgccagttttttcattgggttatttgttttct

SEQ ID NO: 789 - DNA, 601 bp, Human
tcagcactatgttttccactatgtggagagagttggtcagtaacaggaaatgaaactgactcatatggagaagcagagacaagagataggattactggtgattttagggttcccgaagaccatctacatatctcccattcctgttgcctgactgttgaaatttttctgattccatgaaataaaaattctcctttttggctaagctattattttgggtgggattctatagggtgcaagtggcaaaaatgtagctacaattagcttaagtaaaaagagggaattgaggagagatccttaggtmactcacagaattaaaggaagactggatcaattgagctttagcaaggcagaagcaagcactttagaagggactcagaacctagggccaagacttaggtaatgcagcagcacacttccctcacgtggcctttgctccttctttctggacactgtgctctctgtggaggaatactttgattaccttatgtgtttccaccagtactttatttaccccataaccctcatctattcattggcatttttatgtgcattgccacagaaggagacgttacagcacactgtgtttttgaatctcaaaagc

SEQ ID NO: 790 - DNA, 601 bp, Human
gtagaggaggaggggaacaggctgataaaaacactgaactgcattatctaccttgtgtgcctatactaataaaggtttccttaatgtcacattgatatgatcaaagcaagaaactaaaattatgaacaagatactgactatgtcttttatgactcattagttcagaattagaacctgggctctggaaaaaaaataacacagccatttcattgtaaatttgtaaactttgcagcagtttaaccatgagagttggcatataggtcagggaataggcctggtgggttttgctgtcaaatcccaytatactcctgcagagaataaagtgctttgtgcttcgtgaaaattggtttgtagtatgtgtgtaccaattatcaggattgtcagaaatgttggccaatttcctttcaggttcatagggacttaaatctgaaatacttctctacaaaaactttacttagctgcataattctgaaatagctttattctggccaactgcttatttataacagccttttcaggtaatattctaggagttatttctcaagatttattccctttatttttcttgatattctttcaggtgcaaggaaataaaaaataa

SEQ ID NO: 791 - DNA, 601 bp, Human
ggctctggaaaaaaaataacacagccatttcattgtaaatttgtaaactttgcagcagtttaaccatgagagttggcatataggtcagggaataggcctggtgggttttgctgtcaaatcccattatactcctgcagagaataaagtgctttgtgcttcgtgaaaattggtttgtagtatgtgtgtaccaattatcaggattgtcagaaatgttggccaatttcctttcaggttcatagggacttaaatctgaaatacttctctacaaaaactttacttagctgcataattctgaaatagytttattctggccaactgcttatttataacagccttttcaggtaatattctaggagttatttctcaagatttattccctttatttttcttgatattctttcaggtgcaaggaaataaaaaataatttggcttatgtatacaatttggataattttgtagtttttcttacactgtgttgctcatttatgagaaataggcaaatagataaagaaaattcggttactgcatgaagtactgaaaaaatgtaaaaaaaattccttggggaagtcatattttagtccacgttctgttgttaatttta

SEQ ID NO: 792 - DNA, 601 bp, Human
ctctggaaaaaaaataacacagccatttcattgtaaatttgtaaactttgcagcagtttaaccatgagagttggcatataggtcagggaataggcctggtgggttttgctgtcaaatcccattatactcctgcagagaataaagtgctttgtgcttcgtgaaaattggtttgtagtatgtgtgtaccaattatcaggattgtcagaaatgttggccaatttcctttcaggttcatagggacttaaatctgaaatacttctctacaaaaactttacttagctgcataattctgaaatagctytattctggccaactgcttatttataacagccttttcaggtaatattctaggagttatttctcaagatttattccctttatttttcttgatattctttcaggtgcaaggaaataaaaaataatttggcttatgtatacaatttggataattttgtagtttttcttacactgtgttgctcatttatgagaaataggcaaatagataaagaaaattcggttactgcatgaagtactgaaaaaatgtaaaaaaaattccttggggaagtcatattttagtccacgttctgttgttaattttaat

SEQ ID NO: 793 - DNA, 601 bp, Human
tatcctgttaattaaggattttgaaactcagattctcctgatttgttgttcaatttcctttctaaaattttaaagtacttttcttttattgcttattagctatttggtttaactttaaattgctaaaactttttgaagaatgaaatgtattttacagttaccatttgcatttaatgtgtaaaattgattttaggctttcattaagtcaacttttatactcaaggtttagaattttccttgattacaggtggctcacacctgtaatctcagcactttgggaggctgaggcaggcggatcacraggtcaggagattgagaccatcctggctaacatggtgaaaccctgtctctactaaaaatacaaaaaaattagccggattagcccggcgtggtggcacacacctgtaatcccagctacttgggaggctgaggcaggagaatcacttgaacccaggaggtggaggttgcagtgagccgagatcactccactgcactccagcctgggcgaaagagcgagactccgtctcaaaaaaaaacaaaccaaaccaaaccaaaccaaaaaaaactactttccattgctaaatgtgtttccggctcaagc

SEQ ID NO: 794 - DNA, 601 bp, Human
ctgcactccagcctgggcgaaagagcgagactccgtctcaaaaaaaaacaaaccaaaccaaaccaaaccaaaaaaaactactttccattgctaaatgtgtttccggctcaagcagagatactggttgccatttactcaaataagcaagcctactaattatctgcaaatggcatgtcaagtgacccccaaaattaaacatctttatgtaaaaggttttctcttctaatgtttactttggtctcagaatccattatttaattaaacagttatattgtttatccagctaatgcaactcagtgcrtaagaaggcatttacttaaatctaagaatatacttgaatttttattgctattaattgtattggtgaattcttttgtaccatagcacctttcaagtttgaaaatgcagctcttttgctgttagatgtaagtgcctctgtacccatttcataaagactcatcacctattctgagaccttgattttgccaccccatcacccttttcccttccaaaggcaaggacaaaccagagcaattgtagcaacatgaaatcgcaaaagaaagacaaagcttcatggttctctttacaccataataaccga

SEQ ID NO: 795 - DNA, 601 bp, Human
caattgtagcaacatgaaatcgcaaaagaaagacaaagcttcatggttctctttacaccataataaccgagcagtctcaaatctctcattaaattttagtgtttcgagtaatctcccatggtttttagatggtaatagtaatgtccttttacctctaccagtttgttccagacttctttgatattacaaatgggatacggtgtataaagctggtcaaagtcaagaaaactttggtaaatactcctgtaactatagatactggtggttcctgcagggtattggtattccagacctgaaagaytcatacacaatcaatctgaaagtcagagcagagcaaatgcaccataagctgtgaagttacttagtggttctttgactgcttaactgagctggtgaaagtcagggcctgtgtatatatgtttaagtgataatctgcatcagttaattttcctgtttcagatttgccagttcaccctgaccatcttgaaaataagttatctctgatctctgtctgtatgttacttctctcccctcaccaacggagaacaaatgtgggcaaagtaagtaaagcaatcaccacctttggagggaagaattggtc

SEQ ID NO: 796 - DNA, 601 bp, Human
actcctgtaactatagatactggtggttcctgcagggtattggtattccagacctgaaagactcatacacaatcaatctgaaagtcagagcagagcaaatgcaccataagctgtgaagttacttagtggttctttgactgcttaactgagctggtgaaagtcagggcctgtgtatatatgtttaagtgataatctgcatcagttaattttcctgtttcagatttgccagttcaccctgaccatcttgaaaataagttatctctgatctctgtctgtatgttacttctctcccctcaccaayggagaacaaatgtgggcaaagtaagtaaagcaatcaccacctttggagggaagaattggtcatgttctatggatggtggatcaactctattgcggatactcagtaacatttttactctctaactcatcatttacacctcaaatcttttttatttaaatgctctgaagttgtagctttgaataatagtcttcgatgtggtaggggccttaatcaccatcattctagtctaactcgtctcccatcaaatcccatcctatgacattcctgatgaacataatttagcctctatttaaaaatatc

SEQ ID NO: 797 - DNA, 601 bp, Human
tgcaccataagctgtgaagttacttagtggttctttgactgcttaactgagctggtgaaagtcagggcctgtgtatatatgtttaagtgataatctgcatcagttaattttcctgtttcagatttgccagttcaccctgaccatcttgaaaataagttatctctgatctctgtctgtatgttacttctctcccctcaccaacggagaacaaatgtgggcaaagtaagtaaagcaatcaccacctttggagggaagaattggtcatgttctatggatggtggatcaactctattgcggatastcagtaacatttttactctctaactcatcatttacacctcaaatcttttttatttaaatgctctgaagttgtagctttgaataatagtcttcgatgtggtaggggccttaatcaccatcattctagtctaactcgtctcccatcaaatcccatcctatgacattcctgatgaacataatttagcctctatttaaaaatatctatgatgaagagtgcattgtcttaccagaaagcccattccacttccaattgttgtgagagttagaaagttattcctcagttttggtttaaacctggctc

SEQ ID NO: 798 - DNA, 601 bp, Human
ttgtagctttgaataatagtcttcgatgtggtaggggccttaatcaccatcattctagtctaactcgtctcccatcaaatcccatcctatgacattcctgatgaacataatttagcctctatttaaaaatatctatgatgaagagtgcattgtcttaccagaaagcccattccacttccaattgttgtgagagttagaaagttattcctcagttttggtttaaacctggctccctcttcattccacacattgacattagttcagtttacaggagctacatagaatagtctaccatattttyctcatgactgtctttccaatatgtgaagtgaactataattcttgccttcctcctaaatgtagttttctccaatttcatttggtatgcctattaaaatgcagagtcctgtttctccagaggtttttgttgattaggtttctggtaggcctaggatttctgtctgttttgtagtgtgatctgtgtttacatccgagtagttttatcaggctgtttcttgtctgtggaattttggaggtccaatagctttcttttgtcttgtactctatcctttaaatttcaaagtggcagtgtttccactgg

SEQ ID NO: 799 - DNA, 601 bp, Human
gatgggttgggctagttatctgcagcatgaatatgtccttaaggcacagatcgctcatgctattgcttgtggtttaagaacgcctttaagtggtttttggccctgggtgggccaggtgttccttgctctcattccggtaaacccacaaccttcagcatgggtgtcatggctatcacaaacatgtcacagtgctgcagagattttgcttatggccagttttggggccagtttatggccagatttgggggcctgttcccaacagttgttggccaaagattcatttgattaacctgatttttcmgtaacagacgattccgatgattctggtgttagctctgtttagaaataactccaagaacagtttttatattttattttcacattgaaaatcagtcagatttgcttcagcctcaaagaatgtgtctaatgaaaattaaatgagcgctggcagtgagctgcacttttctttttctaaatggaaaaagggttaaggccttttgtctgatcgaaaacccttaaaacagccatctgactcaaaggcctgacagaaccaggcccaccatgattatctaggataatctcttgcatgtacagtcaactg

SEQ ID NO: 800 - DNA, 601 bp, Human
aacacaatagttcttgaattagcagttacaacttacaagttgtaaattgtttttccatgaggacttaaaagtttcatgtacattaaatataaatttcttttggctggaaatggcattggtactatttaaatagtctattgctggctgggcacggtggctcacacctgtaatcccagcactttgggaggttgaggcgggcggatcaattgacgtcaggagtttgagaccagcctggtcaacattgtgaaaccccgtctctactaaaaatacaaaaattacgtgggtgtagtggtggacaccygtaatcccagctactcggaaggcttttatatgcatttttgaatgcaaatttttaagatctgtgtggtaattagacatataatcatagttataattattattttatactgaaaaactttccaaaagacatttagggtatcatggccaaagcgagtcactgttttatttaaaactacagtcagttcaaccacaagcttttctgagtgtctattgtagtggatatatgtgcttttctttgtcaacttccccatcagtaaaagcaccctaattttattttggggttccactttctccctgccct

SEQ ID NO: 801 - DNA, 601 bp, Human
aatcagaaaatctgagttttggtgtgatttccattttattacctatgacactgtggttcgtttaacctcagtgggcctcagtttcctcattttttcaagttggagggttggattaagataatttctgagggccttttgagaatatctaaggtatgccccagaataaaaaagtataattccttaactctctttaacttgttacaaacattgctagtttcataatttcatgaaataaaaacaatctgtattaatcttggcactagtttatatgcatttatgacttaggcttttaggattttcycaccaaaaggtatagagaaaaacatgtataaagagctcagaaacatatagatttatatgaatatttacacctctcatactaccttaaataatctttaagccagtatttgcaacactgcaacaaaaatacatggctttagcatagcacgtattctctttaagtattgtacatctggaggaaataaaaatgtgtttgaaggaaaacaaacattgcacctttcctatcaattattgttcttgaacagtgctggctactttttagcataaagttgtgggcagaatgttaaaaaattggtttcag

SEQ ID NO: 802 - DNA, 601 bp, Human
aaataaaatctttaaaacatttgaactgtaatgaatatagagagaagcatataaaacaaatttaatggttgacagataatatgataaatcattataataattgtaaggcaaatttctcattattcaccacccccaaaaaaagaacattgcaaatatcccaaaacttcttgtttgttccttcttcatcacaaatctaatttacctttttttaaaaaaagaaagttatttacttatttattttgagacggtgtcttgctctgtcgcccaggttggagtgcaatggctcgatcccagctcactkcaacctccgcctcccaggttcaagcgattctcctgcctcagcctcccaagtatctgggattacaggcgtgtgcctccacacctggctattttttttttttgtatttttagtagagatggggtttcaccgtgttagccaggatggtctcaatctcctgacctcatgatctgcccacttcggcctcccaaagtgctgggattacaggtgtgagccatcatgcctggcccaaaaaaagttttatatgattatggtaggcattaaatcatagattattttgcttaacattatgtttatgagatt

SEQ ID NO: 803 - DNA, 601 bp, Human
acccagcccctactcaagatggagttgctctggttcagacgcctctgacagctcccaccctagtacaaggtgccatcaactctcacgtgagttattgcaaggacctccaaactggtctccctgcttttattttttgccctcttcaatacattctcaaaatagcaatcagagcactccttttataatgcatgtcggatcatgtcacttttctcctccaaactctccatggatttctggttcacacagagtaaaaaccaaagtccttaggataacctccaaggccctacctgatcattctgcytgccactttacctgtctggtctcatttcctactgttcttcctttcactttactcagttccagccacactgggctccttgctatttcttgactatattagaaaccatcttttcattttagcttttcctgccttgaatgcttgtcctccagatttccacatggttcgctttgttactgtcacttcttttaagtcttcgttcaaatgtctccttttcaatgaggcctactctgattacagtatttaaaattccatatcttcttaccttgtaatatattctttttcctttcctttcctttcctt

SEQ ID NO: 804 - DNA, 601 bp, Human
acgtaagtgtttaagatagtcatatggtaatatgacccagtaattctattcctaggcatatacctaagatggatgaaaatatacatccacacaaaaagttgtacagaagtgtcagtggcaacattcttcataataaccaaaaaacagaaactgcccaaatgtccatacactgatgaatggataaacaaactgaggtatatccatacaatggaatattattaggcaataaaagggaatgaagtgctgataaatgcttcaacacgatgatccttgaaaacatgatgctaacagaaggaagccrgttactaaagaccccaggattttatttatatgaactgtccagaataggcaagtccataaacacagaaagcagatcagtggttgccggggatggaggaagctggtgaaaggggagcgactgctaatgaggaagaggtgcattgtggggtgatgataatattttgaaattagacagtggtgatgattgctctgttagatacattcactcaatgtactaaacctagtgaattgtatgctataaaagagtgaactttatgatatatgaataatagaccaataaaactgatattttaaaaaatac

SEQ ID NO: 805 - DNA, 601 bp, Human
tctaacaagatgttcagggacttttatggaaaaaattagatgagatttacatctcatattagggaagaactcagtatatggagacagatagtcatacattttaggactgaatgattaaaggatatcaatttccttttcattgttatagactcaaaacagtctcaataggatctctattaaattcctaacaatttttttagaacttgacaagctgattctaagatgtatatggaaagtcaaaacccaaagaatgctaaagcactcttgaaaaagatgcaaaatgggagaatttgtgctatcrgatagcaagactcgttttaaatctgtagtaatcaagacaatgtttctttattatttctttttcccttctactttctttgattttttctgttctaactgcttaagtgaatgttcgattaaatgttttattctaacagattataaaggaatgatagcacattaattttcagcctttcttctttttgaaaagtattatttatggctttgagctgccttctacatacttctttatctgtgtgaaataaattttgagatactgttttcactaagatcagtttaaaataggttctgattttcatat

SEQ ID NO: 806 - DNA, 601 bp, Human
ataagtacaagtgaaagtgagtgagtgtgccctagctttggaccaatactgtctataaagtttgtggggacatataaatgttttatctattttcactagataacagctgaaaggtttgagccaaatagagagtctcaggtgcttctataatggtattataataggctttaaaaacgtgaaaaactcatgtttaagaacagctgttaccaactatctgttttgtgagggtggaggacaacttagtttttctcagaattaattatactttcttattgtaactttagccgctgttatttgggtstctaaacctatacaaattaagaagctatgaacatgagagaatcaaacaattagatttctgtgcacaccaacagaatttctgaaccaaagtggtttgtgtttaggagatgaaagagatgataaatcatacacacacacatagataaacacacatattatatgcatgtgtgtgcatgtgtgtgtgtgtataaacacagagagaaaacatactggcatacacataagcacctgttaattgtagttgctgttatagtagtaagatgttatctcttagaattatggtatacttatcatattagac

SEQ ID NO: 807 - DNA, 601 bp, Human
atcacagctgctaccaggccatcgggaattgtaagatgctataaatttaaacaatgatgctgatgccagaggtgttaaaatgttgtgaatcttaaaacagaagacatacaatactactctcttcctttgtatttcctgtagttcaactaaaaatctcacctttcgttggcccctaggactttgtgagtagctattttctctgaaatcccatagtactttatttaatgaaaggaactaagtaataatttggggtgaaaataatccatgtacatggttaaaaaaaacttacttatgtataaascagtagccctctgctctactacctacactaaagggtataacctgaccctaggaacaactagtttgaaccatttctggttttagtccttcttcctctagggctaaattgtatgtttatactgtctgcttttctttttttttcatttatcatttaagcagataccatagtagaagataatttagcctactcatttcacctccttttcttttttgctcctccacatatattaattttatgagctcctttattggttacatttgtcatttccaccacgatatttgttccattaactacagacag

SEQ ID NO: 808 - DNA, 601 bp, Human
aatcaagaagtattctacagttacatttcattcagtatggctcctgagccacccaaagaatgttcctagaatcaaagttaaggagattctttctttcaaatggattatttaattctagcatttgctaaaaatttgccatattttcttttcattcatatttacattgtgaatttctgtgacgctttttcaaattacctttattttttcttattgggaaagcatatgtgggccttcctggtttcatccttaataattttcagctttttacttcctttatttttttgaatgcattttcttcctkttttttttgaagtccactgactcatattctagtggcttcaattttgaattatgacttcctttttccctggtgtttattctgtttttattttattttcaagtttttttctggcttcaggattatattatgtgtcaggttgccttccatctccaccttcctccttgccatctccttttgggggccatctatactacagctgctatctggactagtcatttgaaagtttgcagagccagcaaacttgtttgtaaccacgatttcctgaatgtgtatgtttttgtcgtttttggttttctcctc

SEQ ID NO: 809 - DNA, 601 bp, Human
tatgtttaggaatgaatctgtttccattcttctttcttggagcctggtagccatatttttcactttgaacacttgtgccttttatctctgggaaatgtgccttttatctcttgtgccttttatctctggaaacacttgtgccttttatcgctgggaaattttcttgtattttttttgtgtgattattttctcctttctattctttttttctggaagtactgttggttggatttgggtctcttggatttatttttaagtgacttctttttcttaaacatttatttcctggttttttttttttgcctttggggggaaatgttaattatgcattttttttaaaaccattgaaattttttttttgtactatgcatgtaattttcaaaagctctttcttgctctcattattcctttgttattttatggatccaaaactttctgaaatgtctctgccaatactcattaaagatttgttaaagcttttttttttttctttaatttatccctgtgtccctggtggttagtttcctttttactttctttttataaaagaaaaatttaacacaatgctaaagactttcttcatgtctttgtgtctccattc

SEQ ID NO: 810 - DNA, 601 bp, Human
tcactttgaacacttgtgccttttatctctgggaaatgtgccttttatctcttgtgccttttatctctggaaacacttgtgccttttatcgctgggaaattttcttgtattttttttgtgtgattattttctcctttctattctttttttctggaagtactgttggttggatttgggtctcttggatttatttttaagtgacttctttttcttaaacatttatttcctggttttttttttttgcctttggggggaaatgttaattatgcattttttttaaaaccattgaaattttttttttgtactatgcatgtaattttcaaaagctctttcttgctctcattattcctttgttattttatggatccaaaactttctgaaatgtctctgccaatactcattaaagatttgttaaagcttttttttttttctttaatttatccctgtgtccctggtggttagtttcctttttactttctttttataaaagaaaaatttaacacaatgctaaagactttcttcatgtctttgtgtctccattcagcatggctgttaaatgaagaaacaggaagaatgtgacttctgtgcatatgggcagtgt

SEQ ID NO: 811 - DNA, 601 bp, Human
attgtctttggccatttgacacctttgaatactttgctcgtgtttgaggaatttccacttaataagcccctgttttcccaagcttcctggcagtctgcctgtagagtgtgaagtaggctccatcagttagaggcatttgtgccagattttagatcagaagtgtgggacatgaaagggcagatgagctccccggagctcagaggtagtaggcattgaggtttcagtcataacatgcagtatcctggtatggtgcagggctgtcttctctagagcaattctgcatgggattttgggtgtggtsttggctgtgtgcttttctagcttggttctctggcactcactgaggttcggagagctacccagtaaactttaataaatttctttcctgcttagactagtcaaagttcatttcagttgtttgttagtcactctcctgacagttacatggagctagtttagctgctgtgcaatgtttgtgaggaggtgaattacatacgcagatattacatgtgcagaccaaaatggcctctccttttagccccacctcaccctcctgcccttatcatttagaacatctgcaggtttgttttctcattgttga

SEQ ID NO: 812 - DNA, 601 bp, Human; identical to SEQ ID NO: 479

SEQ ID NO: 813 - DNA, 601 bp, Human; identical to SEQ ID NO: 480

SEQ ID NO: 814 - DNA, 601 bp, Human; identical to SEQ ID NO: 481

SEQ ID NO: 815 - DNA, 601 bp, Human; identical to SEQ ID NO: 482

SEQ ID NO: 816 - DNA, 601 bp, Human; identical to SEQ ID NO: 483

SEQ ID NO: 817 - DNA, 601 bp, Human; identical to SEQ ID NO: 484

SEQ ID NO: 818 - DNA, 601 bp, Human
aagtaccaaataattaatttggcatttctaatacacagtttttttaaaagagctttcatatacggaagtagattataaacctcttgcatccctacatttcctattatatgttttattttttaatatagcattctgctctgttaggtttcctcttttctcctcctgctaattgaggtagcaagacagtcaggtttagggtcacgattgtcaggtccatgagtataccaaatgttcagttcaagttcaggttctagctcacactgaggtccgaagggagtgggtggatgggcaatagctgaamgaacactctgggggccttaaacaggtgaaacgtagttttattcagcagctctctatcagcagcttactcaaactaggtctctcattagcagctctcttagcagcagctttctctcactgtctgctctgttttgactgcttgggccagctgctcctatgcacagctgcacggctggctctctcttgccttcagggtcagcagcttaactctttctctctctgggcatgaacgtgaaccatgctgtgccatgttgtgccatgctgagccatgccctggctcccctcgtcagagcaagactga

SEQ ID NO: 819 - DNA, 601 bp, Human
ttcagttcaagttcaggttctagctcacactgaggtccgaagggagtgggtggatgggcaatagctgaacgaacactctgggggccttaaacaggtgaaacgtagttttattcagcagctctctatcagcagcttactcaaactaggtctctcattagcagctctcttagcagcagctttctctcactgtctgctctgttttgactgcttgggccagctgctcctatgcacagctgcacggctggctctctcttgccttcagggtcagcagcttaactctttctctctctgggcatgaacrtgaaccatgctgtgccatgttgtgccatgctgagccatgccctggctcccctcgtcagagcaagactgacagctctggtactctctctctgggtacaagagcgcctgtacaagaacatctgtagagtgtcagcagggcaattataccttttacagacaacagtggcatatggccaagggatggccttcccatgttatggctacatggctgtgataacagatggagttatatgcctgcgcactactcgctgagtcatgcaggcctggacatctgccttggcctgattcttgaccgaagcac

SEQ ID NO: 820 - DNA, 601 bp, Human
aaagaagagtgaactcagttcaggagtgctagatatttgagtggaaaaggaaaaaaggtgcgttttatatttctttttcagatgatttttcgtattcgatctctttataaacttaaaaatatgggtggctaatatttgtgctagaaagagaacaaagatattgttttcaaatagccatatacttataactcaaacagcgaatatgtcattaagttttctaattactctagtgatgatatacaccatttttatgtcaattttaactctttaaaattctttctcattaattcttctatttgaygcttaaagtctcgcttccttcagttctgcagttattgagataataccgttgaggagcaatgtgctagaaactgtccctatacaaatgaatagagacagaaagtaaagtggggctgagaggagggggaattggggagttactgtttaatggatataaagtttcaatttgggaaaatgaaaaatgttctggagttggggagtggtgatggttgcataataacgtgaatgtatttcatgtcattgcactgtacacttaaaatggttgaaatgttaaattttatatacattttattacagtaaa

SEQ ID NO: 821 - DNA, 601 bp, Human
atttaaaaagaaacttaaagacatgtaaaaaaggatgaatggttacgatcactgtcctttaggtgctcaaaggctagcagttgggacctgtatgtacagagtttcagtttaagtggttaccgatatgtatttggtaggtacataatgtcatgggagcccatcattgttgtgagatcttagatgggggttatctagttaagctggtgagagaagagaggaggaaaggtttcctaaggaaggagatagctgagttgagtcattagagataaataagagctaatgagaaaatatgtgggcagtrtagtgttgggaagagatcagtatcacctggaaccttgttagaaatttaaatttgcatgctaaatgacgagttaatggttgcagcacaccaacatggcacatgtatacatatgtaacaaacctgcacgttgtgcacatgtaccctaaaacttaaagtataataataataaaaaaatttaaatttgctagctcacccctgtgaataaaaaattagggggggtggagctcattaatatatgttttgccaagtcctttgggtgattctgatggaactcaagtttgaaaattcctgctgtagagg

SEQ ID NO: 822 - DNA, 601 bp, Human
gtgagatcttagatgggggttatctagttaagctggtgagagaagagaggaggaaaggtttcctaaggaaggagatagctgagttgagtcattagagataaataagagctaatgagaaaatatgtgggcagtgtagtgttgggaagagatcagtatcacctggaaccttgttagaaatttaaatttgcatgctaaatgacgagttaatggttgcagcacaccaacatggcacatgtatacatatgtaacaaacctgcacgttgtgcacatgtaccctaaaacttaaagtataataataataaaaaaatttaaatttgctagctcacccctgtgaataaaaaattagggggggtggagctcattaatatatgttttgccaagtcctttgggtgattctgatggaactcaagtttgaaaattcctgctgtagaggttaatatgacagattttagagtcagactacctggctgtaccacttactaaatgcactcacaaagcacttgctatgtttaacagttgttctacctctagaaattaacacaatggaaatatttacacaatgtttaaaaattatttgttgaatgaatacatattgccaaaa

SEQ ID NO: 823 - DNA, 601 bp, Human
gggatgatgctatgtcacagttgtcattatgttttctgtgcaacatgtacagtattgctctctgggcagtattaattgctcctcacattcaatcactgtttcacctgaatgaatattgtggaagctaaatataaaattgtaaatttaataattccaggaatccttatataaaataatagggggaaggaaaagattgagaagaaattagttaatatatagaaacacacacacacacaagcatactgtaagggaggaaatatgcacagctgccactgctcttctttctgtattgattaccagkctgtagttaatatttattactagtgttagaccactggactaattctttaagtcacccagaggaggaacccagatatagtgccactgccatcatatctggacattgaatgtccctgtggtcatcatttccacatggaggtcacctgatgccacgactgatgaacctacaagcccctgcatctttgtgcaatcgtcatgagggctagtgtctcagatgtagttatctagttggtgagaaggtgctctagctgccagtgtttcagccttgtatgatggtagattcttcagtcagatattgggc

SEQ ID NO: 824 - DNA, 601 bp, Human
atgagaaaattaggtaaattaggtagattttcaaactttcttacaagatgatttttaatttggtcttcttttacttggaacctaggtttctaaaaatattagcacagtaaaacctgtcataatttcaaggaatttgagaaacagtctcccatttttttcctgccacattatatacctctatgatttggttaatatgttcattgcaccaactatcacatgctgtttctgcctttaattctatttttgtttggctcttaaggcaatgtatctccaaacaattaaataggactctaattcaatrggtagagctggtcaatataggaagagctggtcaatataaccaatgagaactccatggaagagaaaatccataatggtgattactacagaaaagctttgaatcagactcacctattttggacatcagagaattcacaagagaaattttcaaatgcttccatgtgtaaaaaagtatattttaaaagggataaaatctaatgtttgtaagggatttaaaaccatataaatatgtcccttaagggaaagctttgtttgggctcagatattaatgtttgtcagagagtctgaaggacagatactc

SEQ ID NO: 825 - DNA, 601 bp, Human
tttctaaaaatattagcacagtaaaacctgtcataatttcaaggaatttgagaaacagtctcccatttttttcctgccacattatatacctctatgatttggttaatatgttcattgcaccaactatcacatgctgtttctgcctttaattctatttttgtttggctcttaaggcaatgtatctccaaacaattaaataggactctaattcaataggtagagctggtcaatataggaagagctggtcaatataaccaatgagaactccatggaagagaaaatccataatggtgattactayagaaaagctttgaatcagactcacctattttggacatcagagaattcacaagagaaattttcaaatgcttccatgtgtaaaaaagtatattttaaaagggataaaatctaatgtttgtaagggatttaaaaccatataaatatgtcccttaagggaaagctttgtttgggctcagatattaatgtttgtcagagagtctgaaggacagatactctagaaatgtaatattttgaaactgctctgagattttctcttagatctaggaaggaaattctctttctttattaggtgcctactgtg

SEQ ID NO: 826 - DNA, 601 bp, Human
ccactttgttcaccccttgtcatggacatgctcgagactttgtcatcaccaataagcatgctttttctataatctccatgtcaagaatcctgctctttgaccatctccccttgcacccttcatgttagtttattccctctactactcaacttcaggaataattctccatggttcttggctcccccttctgggtgccaggttctggcctgagtaaccctctcttcttcatgaaaagcagcccatatgcgcatctaagttgttttcacagcctgctttcctaccagcacaatttttaatggtygaaaggctttttttttttttccattttgttctgtctctgtctctttctgtctctatattagcactatttctgctaatacacttctctcacaaaactacctggacctccagtggatctctctggtgttcactccattagatatgataaaagcctgcaaatctcctagagatcttttctctgtcttctctttgatctttgctcagaaggcatttcttaattttaacagtgtttgctatctggagaggctagacacttcaagactatgaagtcctctttccttttgtttaagggccctttctt

SEQ ID NO: 827 - DNA, 601 bp, Human
cacaagaaggaccactgttctccagtttccaataaattatctctcacttccttttgtgccctcactggcagagtctttgaagtccgccagatttctactaacagcctgttcgaggcaatttaggttttcttcaccatgcttctccaaatccttctagcctctgtctgtccgctggttccaaagccactcacacattttcaggttttcattatggcagcaccccactttcaagttccagtatctgcattagtgatctaatgtcatataataaattaacccaaaacttagtggcttaaaacartaatcatttattatctcacaatttctgtttttaaggaattcagctgcagcttagtgtggggtggaatgggaaaggagtatctgcttcagggtctcttacaaatactgcactgaaggtgtcagccaccaggactgcagtcatttcaaggttcaacttcaggaggagctagttttgagataaattcttggggttccaagttcttcatgggatgttggactgagggcctcagttcctccctggctgtcggctggagacctccttcagttccttgttatgtggatctccccataggacagcctg

SEQ ID NO: 828 - DNA, 601 bp, Human
actgttctccagtttccaataaattatctctcacttccttttgtgccctcactggcagagtctttgaagtccgccagatttctactaacagcctgttcgaggcaatttaggttttcttcaccatgcttctccaaatccttctagcctctgtctgtccgctggttccaaagccactcacacattttcaggttttcattatggcagcaccccactttcaagttccagtatctgcattagtgatctaatgtcatataataaattaacccaaaacttagtggcttaaaacagtaatcatttattrtctcacaatttctgtttttaaggaattcagctgcagcttagtgtggggtggaatgggaaaggagtatctgcttcagggtctcttacaaatactgcactgaaggtgtcagccaccaggactgcagtcatttcaaggttcaacttcaggaggagctagttttgagataaattcttggggttccaagttcttcatgggatgttggactgagggcctcagttcctccctggctgtcggctggagacctccttcagttccttgttatgtggatctccccataggacagcctgcaccattgcagct

SEQ ID NO: 829 - DNA, 601 bp, Human
gcattagtgatctaatgtcatataataaattaacccaaaacttagtggcttaaaacagtaatcatttattatctcacaatttctgtttttaaggaattcagctgcagcttagtgtggggtggaatgggaaaggagtatctgcttcagggtctcttacaaatactgcactgaaggtgtcagccaccaggactgcagtcatttcaaggttcaacttcaggaggagctagttttgagataaattcttggggttccaagttcttcatgggatgttggactgagggcctcagttcctccctggctrtcggctggagacctccttcagttccttgttatgtggatctccccataggacagcctgcaccattgcagctggctttcctgagagtgagccagagagactcactgatgatcttgctttttattttcactgagacaacagaagcaggtggagtttctctaatgattgcttttctcacccaaatctaccaggctgcctgtatcagtgcccatgcacttttcctctcttcttttattgtgaataaattctttgagttctgatctaaggcgaaccctttgttacgtgttctgagtcccgtctctt

SEQ ID NO: 830 - DNA, 601 bp, Human
ctggctgtcggctggagacctccttcagttccttgttatgtggatctccccataggacagcctgcaccattgcagctggctttcctgagagtgagccagagagactcactgatgatcttgctttttattttcactgagacaacagaagcaggtggagtttctctaatgattgcttttctcacccaaatctaccaggctgcctgtatcagtgcccatgcacttttcctctcttcttttattgtgaataaattctttgagttctgatctaaggcgaaccctttgttacgtgttctgagtcccrtctcttattgtcaactcaaggactttcttgccattatcctctattttctgcaccatcatgtttctctctcagctaatagacacgatataataactcccatttaaaaaaataaattttctctgttacacatttctgtcaagtaaccaccccatttcactacttcttttaaagaaaacaaagttttgaattgtatgaatacattatatcttcaaaagttaataaaaaagtcaacaagtgactctggccacgagggaataagagggtctggattactctcctgtgataaacaactagaaaact

SEQ ID NO: 831 - DNA, 601 bp, Human
tcagtgcccatgcacttttcctctcttcttttattgtgaataaattctttgagttctgatctaaggcgaaccctttgttacgtgttctgagtcccgtctcttattgtcaactcaaggactttcttgccattatcctctattttctgcaccatcatgtttctctctcagctaatagacacgatataataactcccatttaaaaaaataaattttctctgttacacatttctgtcaagtaaccaccccatttcactacttcttttaaagaaaacaaagttttgaattgtatgaatacattatrtcttcaaaagttaataaaaaagtcaacaagtgactctggccacgagggaataagagggtctggattactctcctgtgataaacaactagaaaactggaaaaaaatgtaggaaataattattttcagacattggacaaagacagacagaactgtgattcctaagagaaggaaacaaaatgagtactcctagtacttaggctttctgaactgtagaaaattcccagaacatggcacagagctgaggaactcaagctgagcccaacaatcttgcagagataagagttcagagagggtaagggg

SEQ ID NO: 832 - DNA, 601 bp, Human
actgtagaaaattcccagaacatggcacagagctgaggaactcaagctgagcccaacaatcttgcagagataagagttcagagagggtaaggggctcaagttcatggggcagagtactttgaaagcaggagcatacagaaaaacttacagtggggccactttaactctttggctgaatatcaatctggccacaatgttgggtaagaaaaacttctagtaagagaacagttatcagggagctataagctaaacaattcacagaattcatagaggtctgggaatcgttcaagttcccacaaamgagattggagagaccttaatgggtatcagtgacatttcgtaggaactccagaagagctatactttaaaggtggggccaaattagccttagagtcaaggctacactatactattccccaaaatgcttaaaggatgccctaaaagattcaaattagtgctcaagtaacttaactgactttcagaacaaaatccaacactcttcaaggcaaaataaaacaatgtaatattcaaaaatgaaataatcacagtgtctggcagccagtaaacacatgctagatatatgaaaagataggaaaatgtg

SEQ ID NO: 833 - DNA, 601 bp, Human
actcaagctgagcccaacaatcttgcagagataagagttcagagagggtaaggggctcaagttcatggggcagagtactttgaaagcaggagcatacagaaaaacttacagtggggccactttaactctttggctgaatatcaatctggccacaatgttgggtaagaaaaacttctagtaagagaacagttatcagggagctataagctaaacaattcacagaattcatagaggtctgggaatcgttcaagttcccacaaaagagattggagagaccttaatgggtatcagtgacatttcrtaggaactccagaagagctatactttaaaggtggggccaaattagccttagagtcaaggctacactatactattccccaaaatgcttaaaggatgccctaaaagattcaaattagtgctcaagtaacttaactgactttcagaacaaaatccaacactcttcaaggcaaaataaaacaatgtaatattcaaaaatgaaataatcacagtgtctggcagccagtaaacacatgctagatatatgaaaagataggaaaatgtgacccataaccaagagaaaaagaaaaaatagtcaatagaa

SEQ ID NO: 834 - DNA, 601 bp, Human
aaacacatgctagatatatgaaaagataggaaaatgtgacccataaccaagagaaaaagaaaaaatagtcaatagaaacagacccggaaatgacagaggtgatagaattggtagacaaagacagctatcattaatatgctctacatgttcaagaatgtaaaggaaaatatgaatataatgagacaggaaattgaagatgtaaaaaagaacccagtgacatttttaaagatgcaaaatgcattttttgtaaacaaaaatgctaaatattaatttgggcatttagaataatgttattcaatamaatagtatttatggtgtgcagcccatagtgctaggctctgtaagggatgcacttttcattctccttcccttctttcctttctatcaggatggactcatggattcttattttagtttgtgggctacaaaagttacatcatttattttattactgaaatcgtctttctttctagcagtataagatgtaccaggttgatcttatacttttcctgatataacactggaattagccatttctccaaggagccatcgttccttttgttgaagaatggtatttacaaaccagtgtctggaggatagt

SEQ ID NO: 835 - DNA, 601 bp, Human
caagagaaaaagaaaaaatagtcaatagaaacagacccggaaatgacagaggtgatagaattggtagacaaagacagctatcattaatatgctctacatgttcaagaatgtaaaggaaaatatgaatataatgagacaggaaattgaagatgtaaaaaagaacccagtgacatttttaaagatgcaaaatgcattttttgtaaacaaaaatgctaaatattaatttgggcatttagaataatgttattcaatacaatagtatttatggtgtgcagcccatagtgctaggctctgtaagggrtgcacttttcattctccttcccttctttcctttctatcaggatggactcatggattcttattttagtttgtgggctacaaaagttacatcatttattttattactgaaatcgtctttctttctagcagtataagatgtaccaggttgatcttatacttttcctgatataacactggaattagccatttctccaaggagccatcgttccttttgttgaagaatggtatttacaaaccagtgtctggaggatagttgttcgttgttattgtttctagccctctctgtgtgcagagctagtta

SEQ ID NO: 836 - DNA, 601 bp, Human
aaatgcttcttaaactttcctccttgataagatttatctaggtcagcactacttacttggcattcaataggtctgggtggaactagattgcttgcatttattcagaacatagattgcttagctctggaccttctgaattcctcatggggtctaggaatctattttttcacaagttctccaggtgatttttatgatgagtctagtctgggacaataactcagtctcaaattattttggattggcaagagaaaattttgaggtaatgtttttatagattaccaatctgaaatttaaaataagygacttgattaaatgatttacaaaactaatactaaattttctaattccacttcattggtttgttcactattttgctgtcagtttacattacaatcagaaaattaggtggcaccaatttggtgttattcctgtaataatttagcatagaatttgcttggagaagctttaatatattcacattttctgggaagaaaaattggaccaaaagtcagaggacagaatgtgctttctttctaaaccatgtatggctaccaaaaatgaaattccaatactaaagaattatatctctaccttttgtgta

SEQ ID NO: 837 - DNA, 601 bp, Human
ttgcttggagaagctttaatatattcacattttctgggaagaaaaattggaccaaaagtcagaggacagaatgtgctttctttctaaaccatgtatggctaccaaaaatgaaattccaatactaaagaattatatctctaccttttgtgtaaaaatattaccaaaaaggcaaaaatggtaaagagacaaaattttaagttcatttgacaactgttttcatactattttcactttcaagtaaagtttatttacatgtagaggtattaaataaatagtggcactgagtttgtatatgcgtatrtatactggtaaggcataaaatattttgttgcatataaaattttcaagaattccagaaattcttaatgtttgcttgttttaagccaagtatatctcctgttacttttaaaatttgatgatccttttattctcatactttaaaattatcaaatttgttagagtatgttttgatattagtaaaaacagagttcttaacttcttatactgactttggcatgtaacaaggttggtggattccaggtttcacacaaacttgggaaactcctctcacaaatacaggaaatagctaatgtttttcctt

SEQ ID NO: 838 - DNA, 601 bp, Human
taatgtttttccttaaagaaaagaatcatttgaagtaattatataattctctaattttccatttataaaaatattgacatgattcaggttataattattttttagtcatggttactatggtctttattgatctctaaataaaatggtgatgataacagtgaaatttatcttgtgacaataaggcacgttgggtgtaatgaaatgaatattgaacatgatgcacaagacttcagttgagttccaggtctaccttctctccaaatctcagttttcttacctgtaaagtagatgatgttagttccctcaaagggtgctttgaaaaactggattagataatattactaaaggtgtttcatgtaaattgtaataatgaaatttgatgatatatttaatgtgctttctctatttttgtgtcctttgcccatcaaatacccaccagtagggagtacaaaatacttttggcttatacctggggagggaaaattttcttttttcttaaagggccaaatagtaaacattttggggtttgtggaccatcctgtcttggtcacagctattcaactctgtgcttgtagaaaaacaattatagttggtatgtaaa

SEQ ID NO: 839 - DNA, 601 bp, Human
aggcacgttgggtgtaatgaaatgaatattgaacatgatgcacaagacttcagttgagttccaggtctaccttctctccaaatctcagttttcttacctgtaaagtagatgatgttagttccctcaaagggtgctttgaaaaactggattagataatattactaaaggtgtttcatgtaaattgtaataatgaaatttgatgatatatttaatgtgctttctctatttttgtgtcctttgcccatcaaatacccaccagtagggagtacaaaatacttttggcttatacctggggagggaraattttcttttttcttaaagggccaaatagtaaacattttggggtttgtggaccatcctgtcttggtcacagctattcaactctgtgcttgtagaaaaacaattatagttggtatgtaaattgaattaatgttactacatttatgggcactgaaatttgaatttcatgtatcatgaaacagtcttttttttttttaattgaaaatgtaagtaaccattcttagctcacaggctgtacaaaaacaggcagatggctggatttggcctgtgggccagagtttgctgatcccaagcttagaac

SEQ ID NO: 840 - DNA, 601 bp, Human
atgttagttccctcaaagggtgctttgaaaaactggattagataatattactaaaggtgtttcatgtaaattgtaataatgaaatttgatgatatatttaatgtgctttctctatttttgtgtcctttgcccatcaaatacccaccagtagggagtacaaaatacttttggcttatacctggggagggaaaattttcttttttcttaaagggccaaatagtaaacattttggggtttgtggaccatcctgtcttggtcacagctattcaactctgtgcttgtagaaaaacaattatagttrgtatgtaaattgaattaatgttactacatttatgggcactgaaatttgaatttcatgtatcatgaaacagtcttttttttttttaattgaaaatgtaagtaaccattcttagctcacaggctgtacaaaaacaggcagatggctggatttggcctgtgggccagagtttgctgatcccaagcttagaacattttgaaattagttttagattgatgctgatagtgtcatgatggggttagctgttggcatggttacagaaagcttttttaaaaaccaacaaacaatgaattactataatgc

SEQ ID NO: 841 - DNA, 601 bp, Human
tgatgtgattctaacttttctttttgtcttaaaatatgactaaaattttctatcatttaaaatgttagcagagaatatatttgttgttttgtgctcaacttaggcaaatattcttgctttaaaattctgaagtttttcagccaaagcataataccttgcaagaatgtttccgacataaaacaccacaatttattcaatttgttcacagactttttgtaaaagcttttattttaatatttgaaaaacacctaaaaggtctggcttgatatttttaaaaattacattttgtttgctttgcttraagatttagataaaatcaaaagtgctaaatcaggctacctctaattcaaaacaatattttatgggtggatagcattttacagttttcaaaaatacttttatgtgattattgtctttgatattcacaccgttgtaaacatagatggttcggggattgtcttggttttattgattcaggaacctgaggctcacaaatataaacttacttgtccatgatcctatggctaataagcaaacagaagtacttgattttagatctcaatgttaatttagtgtgcttttgacactaatatcccctata

SEQ ID NO: 842 - DNA, 601 bp, Human
tctttttgtcttaaaatatgactaaaattttctatcatttaaaatgttagcagagaatatatttgttgttttgtgctcaacttaggcaaatattcttgctttaaaattctgaagtttttcagccaaagcataataccttgcaagaatgtttccgacataaaacaccacaatttattcaatttgttcacagactttttgtaaaagcttttattttaatatttgaaaaacacctaaaaggtctggcttgatatttttaaaaattacattttgtttgctttgcttaaagatttagataaaatcraaagtgctaaatcaggctacctctaattcaaaacaatattttatgggtggatagcattttacagttttcaaaaatacttttatgtgattattgtctttgatattcacaccgttgtaaacatagatggttcggggattgtcttggttttattgattcaggaacctgaggctcacaaatataaacttacttgtccatgatcctatggctaataagcaaacagaagtacttgattttagatctcaatgttaatttagtgtgcttttgacactaatatcccctatacagttcccagtagattcc

SEQ ID NO: 843 - DNA, 601 bp, Human
gttttgtgctcaacttaggcaaatattcttgctttaaaattctgaagtttttcagccaaagcataataccttgcaagaatgtttccgacataaaacaccacaatttattcaatttgttcacagactttttgtaaaagcttttattttaatatttgaaaaacacctaaaaggtctggcttgatatttttaaaaattacattttgtttgctttgcttaaagatttagataaaatcaaaagtgctaaatcaggctacctctaattcaaaacaatattttatgggtggatagcattttacagttytcaaaaatacttttatgtgattattgtctttgatattcacaccgttgtaaacatagatggttcggggattgtcttggttttattgattcaggaacctgaggctcacaaatataaacttacttgtccatgatcctatggctaataagcaaacagaagtacttgattttagatctcaatgttaatttagtgtgcttttgacactaatatcccctatacagttcccagtagattccttggcacattaaagccatgcaaatgttgtttcagggttgattttttttagtagtaaagtaataataa

SEQ ID NO: 844 - DNA, 601 bp, Human
aagtttttcagccaaagcataataccttgcaagaatgtttccgacataaaacaccacaatttattcaatttgttcacagactttttgtaaaagcttttattttaatatttgaaaaacacctaaaaggtctggcttgatatttttaaaaattacattttgtttgctttgcttaaagatttagataaaatcaaaagtgctaaatcaggctacctctaattcaaaacaatattttatgggtggatagcattttacagttttcaaaaatacttttatgtgattattgtctttgatattcacaccsttgtaaacatagatggttcggggattgtcttggttttattgattcaggaacctgaggctcacaaatataaacttacttgtccatgatcctatggctaataagcaaacagaagtacttgattttagatctcaatgttaatttagtgtgcttttgacactaatatcccctatacagttcccagtagattccttggcacattaaagccatgcaaatgttgtttcagggttgattttttttagtagtaaagtaataataaattctattacttgaaaatatatcataattcaaaacatttagtat

SEQ ID NO: 845 - DNA, 601 bp, Human
caccgttgtaaacatagatggttcggggattgtcttggttttattgattcaggaacctgaggctcacaaatataaacttacttgtccatgatcctatggctaataagcaaacagaagtacttgattttagatctcaatgttaatttagtgtgcttttgacactaatatcccctatacagttcccagtagattccttggcacattaaagccatgcaaatgttgtttcagggttgattttttttagtagtaaagtaataataaattctattacttgaaaatatatcataattcaaaacatttmgtattagtggggtatgcagagaaagactagggtctatttttcatgttttttatatctggatgctcatgtatatgctagtttattatagcttctaaagcaacacttttccatactgatttttaaattattacgtttgttaattacagtgttttccctctacaaggactgcaagatttctgaaggcagtgatcatgcactatctccctatccccaggttctttgaaaaacagtgtggtttcgatatgaggtagcagatattaatggatagaatggggcagcacaggtgagatgggtagacag

SEQ ID NO: 846 - DNA, 601 bp, Human
accgttgtaaacatagatggttcggggattgtcttggttttattgattcaggaacctgaggctcacaaatataaacttacttgtccatgatcctatggctaataagcaaacagaagtacttgattttagatctcaatgttaatttagtgtgcttttgacactaatatcccctatacagttcccagtagattccttggcacattaaagccatgcaaatgttgtttcagggttgattttttttagtagtaaagtaataataaattctattacttgaaaatatatcataattcaaaacatttartattagtggggtatgcagagaaagactagggtctatttttcatgttttttatatctggatgctcatgtatatgctagtttattatagcttctaaagcaacacttttccatactgatttttaaattattacgtttgttaattacagtgttttccctctacaaggactgcaagatttctgaaggcagtgatcatgcactatctccctatccccaggttctttgaaaaacagtgtggtttcgatatgaggtagcagatattaatggatagaatggggcagcacaggtgagatgggtagacaga

SEQ ID NO: 847 - DNA, 601 bp, Human
ttgagcatcctttcatatgcttatttgccataactatgatttatatggtgaagtgactgtgtaacattttgcctatctttttaactgggttgtttgtattattattatttagttttgagtattgtagataccttatgtatacaaatcttttatcagatagataattggcaaatatgttctctgtgtatggtttgtctttttgttatctttcatagtgcttctcagaaaacaacttttcaattttgataaagtctaatttatcagtttgttcttttatggatcatgctttttgtgtcatatrtaagaaatttttaattaacacaaggtcacaaaattttttacttatgttttcttctagaagtttcatagctttaggttttacatttagatttatgattcatttggaattaatttttgtatctgatgtgaggtatggattaaagttcttttcttttattgcatatagatattccattgttccagcacaatttatcagaaagattatcatttttccacagaatttcttttgtgcctttgtagaaaatcagttgtccatgtaagtgttagtctattctagactctattctggtccattcattta

SEQ ID NO: 848 - DNA, 601 bp, Human
ttgttttattattttagtggttgctttagcatttataatatttgtcttcaatttattatagtccaagagatagtatacctctaagtgatatcataccacttcgtgtaagaacattacaaatttctcccctcccaagcttggtactaatgccatacattttacttttacctacgttgtaaactccacaccacggatctattatttttgctttaaacaatcaataaatatttatcattttagttaaatttaatttctttgtgtgaaaccacatttctatctgctgtcatttttttttttttttgcctgatggattgcctttagcattttttatagtgcaagtctgatggtgatgaattatttttgctttggtatgtctgaaaaaaaaagcctttatttcatcattattttgaaagctgttttcgctgggtataggattttagaattgcagtttttcttttattttagtacttcacttttacgtcattatctttttgcttatgttattcctgatgattaacctgctgtaatctttatctttgtttttctaatgtagggttttttttttttcagataccctttaagctgggtgtcccaaatagtt

SEQ ID NO: 849 - DNA, 601 bp, Human
atttattatagtccaagagatagtatacctctaagtgatatcataccacttcgtgtaagaacattacaaatttctcccctcccaagcttggtactaatgccatacattttacttttacctacgttgtaaactccacaccacggatctattatttttgctttaaacaatcaataaatatttatcattttagttaaatttaatttctttgtgtgaaaccacatttctatctgctgtcatttttttttttttttgcctgatggattgcctttagcattttttatagtgcaagtctgatggtgaygaattatttttgctttggtatgtctgaaaaaaaaagcctttatttcatcattattttgaaagctgttttcgctgggtataggattttagaattgcagtttttcttttattttagtacttcacttttacgtcattatctttttgcttatgttattcctgatgattaacctgctgtaatctttatctttgtttttctaatgtagggttttttttttttcagataccctttaagctgggtgtcccaaatagtttacttcaattagtatttagtatcctgctttaaaagcctatccagtatttt

SEQ ID NO: 850 - DNA, 601 bp, Human; identical to SEQ ID NO: 485

SEQ ID NO: 851 - DNA, 601 bp, Human; identical to SEQ ID NO: 486

SEQ ID NO: 852 - DNA, 601 bp, Human; identical to SEQ ID NO: 487

SEQ ID NO: 853 - DNA, 601 bp, Human; identical to SEQ ID NO: 488

SEQ ID NO: 854 - DNA, 601 bp, Human; identical to SEQ ID NO: 489

SEQ ID NO: 855 - DNA, 601 bp, Human; identical to SEQ ID NO: 490

SEQ ID NO: 856 - DNA, 601 bp, Human; identical to SEQ ID NO: 491

SEQ ID NO: 857 - DNA, 601 bp, Human; identical to SEQ ID NO: 492

SEQ ID NO: 858 - DNA, 601 bp, Human; identical to SEQ ID NO: 493

SEQ ID NO: 859 - DNA, 601 bp, Human; identical to SEQ ID NO: 494

SEQ ID NO: 860 - DNA, 601 bp, Human; identical to SEQ ID NO: 495

SEQ ID NO: 861 - DNA, 601 bp, Human; identical to SEQ ID NO: 496

SEQ ID NO: 862 - DNA, 601 bp, Human; identical to SEQ ID NO: 497

SEQ ID NO: 863 - DNA, 601 bp, Human; identical to SEQ ID NO: 498

SEQ ID NO: 864 - DNA, 601 bp, Human; identical to SEQ ID NO: 499

SEQ ID NO: 865 - DNA, 601 bp, Human; identical to SEQ ID NO: 500

SEQ ID NO: 866 - DNA, 601 bp, Human; identical to SEQ ID NO: 501

SEQ ID NO: 867 - DNA, 601 bp, Human; identical to SEQ ID NO: 502

SEQ ID NO: 868 - DNA, 601 bp, Human; identical to SEQ ID NO: 503

SEQ ID NO: 869 - DNA, 601 bp, Human; identical to SEQ ID NO: 504

SEQ ID NO: 870 - DNA, 601 bp, Human; identical to SEQ ID NO: 505

SEQ ID NO: 871 - DNA, 601 bp, Human; identical to SEQ ID NO: 506

SEQ ID NO: 872 - DNA, 601 bp, Human; identical to SEQ ID NO: 507

SEQ ID NO: 873 - DNA, 601 bp, Human; identical to SEQ ID NO: 508

SEQ ID NO: 874 - DNA, 601 bp, Human; identical to SEQ ID NO: 509

SEQ ID NO: 875 - DNA, 601 bp, Human; identical to SEQ ID NO: 510

SEQ ID NO: 876 - DNA, 601 bp, Human; identical to SEQ ID NO: 511

SEQ ID NO: 877 - DNA, 601 bp, Human; identical to SEQ ID NO: 512

SEQ ID NO: 878 - DNA, 601 bp, Human
gtggttcggtaacttgttttagaggcaagattagcttaccagtttgtctggctttggagcctgttctaatagcagctgttctctatagcagtggcttctttttctttctttcttcttcgccatgacccacagtgaaaaaaacttaggttggtgcaaaagtaattgcagttttggcatttttaatgtataaatacgttttaccttccaacctagtacaccatagatacagatatgcaagaccgaaatgaaagatacgcaaagcagctttacttcttgcttgaaatagaatgttttaaaattmtattttatttgttaaaaatgctggttgcaagacactaaattgatttcacaacattcgaatggcctatgatttgcagttagaaaaacactgttctacagcttatcaatgaataagtaaacaactaatattgtagacataatgaacaaagaaaaagattgaattgtaatttttcagcaggagaaagaatgccctgtcttcagaagcagcagtagtgttgttttatatacgaacaattctttttatagaaacttcgctttgcctgagtctaatcagccacactcctatatactcctcacctgt

SEQ ID NO: 879 - DNA, 601 bp, Human
atatacttatctaagtaaaattgccaaattttcagtatataggtatatattaattcagggaatgatcatcttactttttaatgtcacttaaaaagaggctgaaacactctctcttcagcatttaagctctgaaatcttacctatggaccaccatgaagtggtttctcagtgttcaggagggccatgaaatgatcaggcccacatcagcaaaatgcagtttaaacctgcagcaaattatttttcccttttccagaaaatgcctggcacaaaggaactactgggtggaggttggttgacttargaaatgcttgtagactacgtcctacctcgctgccgcacctgctctccctgaggtgtgcacaatgctgccacaggtcatctgacagaccttatatacaagtagattgaaatattgccacattttttcaagttctggtaaattaaagaaatgtgaagaatttttataatacagtgggtgtgaatgttcttatttgtaggactgattttttaaaaatctctggaaatatttgactttctaatcttataaattattttttaagcacagctaacccacaagatgcttagtttattactagggctg

SEQ ID NO: 880 - DNA, 601 bp, Human
taataggaaagttgtattaattcagtatttgtcattatgcagtattttaatacctacataagtctattccattattatattttgcgcttggcatatttattcctttatgcttttaatcactaacatattttacttaagagtataaaactatgctaaataaattgtattgtatatggaatatgcttgccattatgaagaacagctgggtataccattatttcaagtaataaatctgaattctattagtttaaaaattgtaaaattcaagttaaatgacgtgtatgatatataagctgaacayattttctatagcccttaatttagttgtgttaatttttcaaggtgatgtatcaacagctttttttattttgcatttgttttttcaatgtgtttacattgtatgaattgagctttttgcccacagattcttgatttgtagttgtttggcaggatttttctttgtgatataatcacttctataaaaaatatgatgtacatttgtcttgtgtatttgtcttcatttcacatgtccatagtaaatatttttacgtgaagttatttataaggaatagtaatttaccagtttgtgatcatctctttc

SEQ ID NO: 881 - DNA, 601 bp, Human; identical to SEQ ID NO: 542

SEQ ID NO: 882 - DNA, 601 bp, Human; identical to SEQ ID NO: 401

SEQ ID NO: 883 - DNA, 601 bp, Human; identical to SEQ ID NO: 402

SEQ ID NO: 884 - DNA, 601 bp, Human; identical to SEQ ID NO: 403

SEQ ID NO: 885 - DNA, 601 bp, Human; identical to SEQ ID NO: 404

SEQ ID NO: 886 - DNA, 601 bp, Human
actttccctgatccagccctggagtcagtcatttttctgaggagacctgatcttgttagtgggttctagtatttagaaacccaaatgctaggtatgttcactgctactggtgtgtctttgcctctaagccctatcagtagaaagaataagggtgtgtgtatgtgtgtgtttatgtatatatacatgcatacatacatatacatatgtatgtttgtttacatacagatgaatgtgtctgcgtatatatatatatacacacacatacatctatatatacatctatataaatactgtatatatrttcccactcttcttcctctttcccttagtgataatgttgatttccaacatcatcaatatatctgccgtctcattccatttccattcatgcctgtagggaattagtttaattagttactggcttatcctcctatgtttctttttggagaaaagtgtgtgtgtacatataagtttgcacttcctatacaaaaggcagtctactatactcttttgtgctttaagaagatattctgaaaatcactccatattggatcatagagctcttcctcattaatttttacctttgtgtgtttccacatat

SEQ ID NO: 887 - DNA, 601 bp, Human
gtatggggtaaggcatgaatccaattatttatttttccaagtgattatccaattgttcgtatatatatatatatatatattttttttttttttttgagacagaatctcactctgtcacccacgctggtgtgcagtgatgtgatcagatttcactgcaacctcaaactcctgggctgaagcaatcatcccacctcagcctcccaagtagctgggactacaggcacatgccaccatgcctggctaattaaacaaaatttttttttttttttttgtagagacaggttcttgctatgttgcacaygctggtctcaaatccctggcctcaagcaatcctcctgtcccagcctcccaaagagctggggttactggggtgagccaccgtgcctggctccaatataatttttttaagttcatcttttcctgagtgatttaggatgctatctgtgtcacatactcaatttctatgtgcattggtctatttatggactttctattctgttccactggtttgtctattgatgtgctggtaccatatgttttaattatggaggcgttatggtatgtttggtatccaatagggtttgttcttcattcttggttt

SEQ ID NO: 888 - DNA, 601 bp, Human
ctcaatttctatgtgcattggtctatttatggactttctattctgttccactggtttgtctattgatgtgctggtaccatatgttttaattatggaggcgttatggtatgtttggtatccaatagggtttgttcttcattcttggtttttttttttttttttttttttttgagatggagtctcattctgttgcccaagttggagttcaatggtatgatctcggctcactgcaacctccgccccccaggttcaagtgattctcttgcctcagcctcccaagtagctgggattacaggcacgygccactacaccaggcaaattttcttttgtatttttagtagagatcaggtttcaccctgttggccaggctggtctcaaactcctgacttcaagtgatccactcacctcagcctcccaaagtgctgggattataggcgtgagccactgtgcccagcctattcttctttttaaggattttcctggctatatccaggccgatttttccatgtgtactttaaaatgaatgtgtcgcactccaaattttgtaaaatttaaaatatttttgtgttaatggtgttaatgttaatggtatcaatggtta

SEQ ID NO: 889 - DNA, 601 bp, Human
caatggttagtggtataacctagatctaattgacctctctcccaaagtgcagtctgacacgcaccctatagcatcagtactgcatacttactggccagtttcatgctgaaatttcatgctgttcttatatttagtgtcgtggacattcacttattaaaatgttttcaatataccctcttccagggttttgtgtgaacagctatttctagagttccagaataaagaggtaaaagtagcagtagcctgtttcctcagcctggctaggaccacgtgtattagtaccttttttttttttttttttaatatggagtctcattctgtcgccaggctggagtgcagtggcgtgatctaggctcactgcaacctctgcctcctgggttcaagtgattctcctgcctcagcctcctaagtagctctgacttacaggtgcttgctaccatgcctggctaatttttgtatttttagtagagacggggtttcaccatgttagccaggatggtctcaatctcctgacctcatgatccgcccaccttggccagtacattttcatactgctctaaagaactgcccgagactgggtgatttataaaggaaagaggtt

SEQ ID NO: 890 - DNA, 601 bp, Human
ctcctgacctcatgatccgcccaccttggccagtacattttcatactgctctaaagaactgcccgagactgggtgatttataaaggaaagaggtttaattgacccacagttcagcatggctggggaggcctcaggaaacttacaatcatggtggaaggtgaaggggaagtaaggcatcttcttcccaaggtggcagaaaggagaagtgccaagtgaagggggaacagcccccttataaaaccatcagatctcatgagaactcactatcccaagaacagcatgggggaacgccccctgcccsccatgattcaattacctccacctggtctctctcttgacacatggggattatggggattacaattcaagatgagatttgggtgaggacacaaagcctaaccatatcaccagttaattaatcccctcaacacctttactgggccccagtttccctgctaatgtgccaataggtgttataagtgccccaaggtggacaagatataagggccaaaaacaaggggcagttttatactcgcgataccacatgtttgaacaattttttagttttcaacatgcctttacataggttctctcattcatc

SEQ ID NO: 891 - DNA, 601 bp, Human
caagttaatttacttctgacctctagtttcctcatatgtagaaatgaggataggtaaacttattctgtagggctgttagaaaaattaaatagaattcatttttcaacaaacatttttttttcccctgagacatagtctcactctgttgcccaggctggagtgcagtggcacaatctaggctcactgcaacctccacctcccgggttcaagtgattcttgtgcctcagccccccgagtagctgggattacaggtgtatgccaccactcctagctaatttttgtgtatttagtagagacagcrtttcatcatgttggctaggcttgttgagaactcctgacctcaggtgatcccccaaccttggcctcccaaagtggtgggattacaggagtgagccactgtgcccggcctcaacaaatgtattgatcagcaaatatgtgtcagtcatggtctaaaaaactggggccctggagcagaataagtcaccatctctgccctttcaagaagcctgtggtttagtggaatgaatcccactcctcctgtctgatacccggggagaaaaaggaacaattcagcaggatcaaaattctaatatggaaggac

SEQ ID NO: 892 - DNA, 601 bp, Human
tagtctcactctgttgcccaggctggagtgcagtggcacaatctaggctcactgcaacctccacctcccgggttcaagtgattcttgtgcctcagccccccgagtagctgggattacaggtgtatgccaccactcctagctaatttttgtgtatttagtagagacagcatttcatcatgttggctaggcttgttgagaactcctgacctcaggtgatcccccaaccttggcctcccaaagtggtgggattacaggagtgagccactgtgcccggcctcaacaaatgtattgatcagcaaayatgtgtcagtcatggtctaaaaaactggggccctggagcagaataagtcaccatctctgccctttcaagaagcctgtggtttagtggaatgaatcccactcctcctgtctgatacccggggagaaaaaggaacaattcagcaggatcaaaattctaatatggaaggactcagagaacatgtctgtctacctaggggtcaaaaacacaaatgggtgaagctaccaggtttgcctgagacaatcctggtttacatctattgccctaacatttaaacgctgggctgctcaaacaaatcatgtt

SEQ ID NO: 893 - DNA, 601 bp, Human; identical to SEQ ID NO: 405

SEQ ID NO: 894 - DNA, 601 bp, Human; identical to SEQ ID NO: 406

SEQ ID NO: 895 - DNA, 601 bp, Human; identical to SEQ ID NO: 407

SEQ ID NO: 896 - DNA, 601 bp, Human; identical to SEQ ID NO: 408

SEQ ID NO: 897 - DNA, 601 bp, Human
cgttctgtgtctaactgaaataagccagcacgtgataagatcttagaatggaatgaatatatgtgcttcatacctgatgatctgtgcttataaatcttgctcggaactgagtcaaagcactgtacaacaagcaaaacaatcagcatgagttttcacttgcgggcaagggcaagagaatacagaatccagaagctcaaaagtgaatgggatgtcccggaaactaaacactcattgagagcaccatttcctggttttgtttttgttagtttcttctgctttctcgttaattttacaggtttcycttctctctttagaagcggttatttgtcattaaacattcttcctgtctagctgtcaccgtttttccttaggagtcctcctgtccccacctcctcaccaccactccctctcttttcatgtcctgtggatactctcactcaagccacctgatctgctgtgtggtcgaagtaggtgaccaagtagtgttgggctctttcctggtatcacttgaaggtgtggcaaggagagggaggtggtggtgagtggtggtaaactgctcatttttcacttttcaaaatggagtggaaaattgagagccgtt

SEQ ID NO: 898 - DNA, 601 bp, Human
ttcctcattgttgggaattatataaaccagtcccagaacatctgacttggggagttcgggaatttttctttaaaaatataataaaatgggaatggaattaaatacacttgaatataccatcttattctgagcttgtaaaagaatctaccgcatttgttactaactatccatttactgaatggctggagatactgatacatgataatgagcatttctagattgcaaacatgtggaccatgtttgcaataacaacatgttgcagttgtgattttgtggtttgtaactacatgttttccttccwaagagaagattcacacccctagggcaaaagtatgattttaaatgaggtgttatagctctgggtcctttaaaaagttatccatgcaaatgaaactgggtatgttgttgaaacaaacacagtcttgcaattacttctctccaccatcctcaaaggtatttatacctattggtgtcagtcctgacactcatatagagacataaggaactctgcaaatatggcttactcttattcttatgttttaaagaatacgcacgcacacacacatatagatcaggtaattcttattgaatacttaatatg

SEQ ID NO: 899 - DNA, 601 bp, Human
gagaactacgatagtggccagtggcaatgaaggtgagaagagattagaatctgtaggtttcaaaggtatttaaactgaattgatcaattatagaatatgtaagatgaaggagtgagagagattgaaactgacctacatttttatatttctcagcaatgacttagaaacaactctttcctaaagttctcctgtctggctggggatacctataaaaaaaaattattggctgggtatggtggctcatgcctgtaatcctagcactttgggaggctgaggcgggtggatcacttgaggtcaggartttgaaaccagcttggtcaacatgatgaaaccccacaaaaaaatgagcatgggcatggtggcgggcgcctgtaagctcagctacttgggaggctgaggcaggagaattgcttgaacctaggaggctgagattgcagtgagccgagattctagcattacactccagcctggacgacaaagagagactttgtctaaaagatttaaaaaaaaataaaaaaattattattcaccatgctaagtataattgttgagtcctggggaagtattattaaaacctagtgaaaagccaactcacttttcc

SEQ ID NO: 900 - DNA, 601 bp, Human
atacctataaaaaaaaattattggctgggtatggtggctcatgcctgtaatcctagcactttgggaggctgaggcgggtggatcacttgaggtcaggaatttgaaaccagcttggtcaacatgatgaaaccccacaaaaaaatgagcatgggcatggtggcgggcgcctgtaagctcagctacttgggaggctgaggcaggagaattgcttgaacctaggaggctgagattgcagtgagccgagattctagcattacactccagcctggacgacaaagagagactttgtctaaaagatttaaaaaaaaataaaaaaattattattcaccatgctaagtataattgttgagtcctggggaagtattattaaaacctagtgaaaagccaactcacttttcctggagtaggttaagaaattaaatataaattctttatttttaagtcaggtttattgagatataatttgcaatcagtaaaacccctttttatgcatgtgcttcagtgagttttgacaaatgtatgtagttttgtaaccattaccacaatgaagataaagaacatttctgcacccatccccctcaaactccctgtgcctttttgt

SEQ ID NO: 901 - DNA, 601 bp, Human
ataaaaaaaaattattggctgggtatggtggctcatgcctgtaatcctagcactttgggaggctgaggcgggtggatcacttgaggtcaggaatttgaaaccagcttggtcaacatgatgaaaccccacaaaaaaatgagcatgggcatggtggcgggcgcctgtaagctcagctacttgggaggctgaggcaggagaattgcttgaacctaggaggctgagattgcagtgagccgagattctagcattacactccagcctggacgacaaagagagactttgtctaaaagatttaaaaaawaataaaaaaattattattcaccatgctaagtataattgttgagtcctggggaagtattattaaaacctagtgaaaagccaactcacttttcctggagtaggttaagaaattaaatataaattctttatttttaagtcaggtttattgagatataatttgcaatcagtaaaacccctttttatgcatgtgcttcagtgagttttgacaaatgtatgtagttttgtaaccattaccacaatgaagataaagaacatttctgcacccatccccctcaaactccctgtgcctttttgtaatttt

SEQ ID NO: 902 - DNA, 601 bp, Human
cattacactccagcctggacgacaaagagagactttgtctaaaagatttaaaaaaaaataaaaaaattattattcaccatgctaagtataattgttgagtcctggggaagtattattaaaacctagtgaaaagccaactcacttttcctggagtaggttaagaaattaaatataaattctttatttttaagtcaggtttattgagatataatttgcaatcagtaaaacccctttttatgcatgtgcttcagtgagttttgacaaatgtatgtagttttgtaaccattaccacaatgaagayaaagaacatttctgcacccatccccctcaaactccctgtgcctttttgtaatttttccctccactacaccccaggcaaccaccgatctgatttccgtcattaatgttgccttttccaggataatatataaatggaatcatatactatgtacccttttatgtctttttttttaatttagcataattattttgagattcattcatcttactttgtgcatcaggagtttattcctttgggggagaaaaaaaaaccttggatttatgaggtgttattgacataccataaacagcgtatatttaa

SEQ ID NO: 903 - DNA, 601 bp, Human
attcctttgggggagaaaaaaaaaccttggatttatgaggtgttattgacataccataaacagcgtatatttaaagtgtacaatttgagaagttttgatatatgtatatacccatgaaatcaccacagtaaagatagtgaatatagccaacacctccaaaggttttctaaagctcttttatacactctttctcctgttccttgcattcccttccttccctgtcccaaagcaaccattgatctactttctggacctgtaaattcatttgcattttctagaattttatatccatggggtcacrcagtattattttgtgtctggcatatttcactcagtgtaattattttgatatgcatttatttggttgcatgtatcaatagttgtttttaaaaatattttttgctaaatagcataatgttgtatagatattctgcaatttgtttatccattcacttgatgaacatttggcttgtttccaggttttggctatcacaaataacgctgctatgaactttcttgtatcaagtcttggtgtgtacacttacatttgtcttatatgattacctaggaatagaatggttggatcataggcaaagaatta

SEQ ID NO: 904 - DNA, 601 bp, Human
aaggtaattttatttttctcctttgtgttctatcaattatttatatgaagcatatgaatgatttcactgaattcaatttgagcatctattaggtgaaaataatttaactgatatttcatgtgtaaataaacaatacggcagattgacttctgagacgtgttagaatagattttgtaaaaccctgaacatgaaattttaattgaaactaatttatgaaatcaggaataaaaatgataatagtcacatatttgatcaaatagaagctggtgcttatggtattaatttttatctagttttgcaygataaattttgaatacttagttaattataaatgtgtgtgtgtctacacacacacacacacacacacacacatatattttaggtaggagtgttagtttgctagggccgccataacataatgggccacgtactgggtggcttaaataacagaaatttatcttttcacagttctggaggctagaaatttaagattaaggtttcagcaggcttggtgtcttctgaagcccttctccttggcttgcagatggctgcttcctcctggtgtcctcatgtggccgcccctagattggtgtgctgtctg

SEQ ID NO: 905 - DNA, 601 bp, Human
ttttcacagttctggaggctagaaatttaagattaaggtttcagcaggcttggtgtcttctgaagcccttctccttggcttgcagatggctgcttcctcctggtgtcctcatgtggccgcccctagattggtgtgctgtctgtgtcctgatctccttttataaggacaccagtcatattgtatgagggcccaccaacttgacttcatcttaccttagttatttctttctgaggtactactgggggttaagactttaacatatgattttgggagggacacacagttcagccaataataacarggcaaccataaaatggttttgtctcattagaagcttggatgttttaaatcttccttacagtctatgcatatatttgttttcgactatcaattaaatcaactcggttcaaacatctagaatcaaaaccatttatgtttacttgtagaaagctttcctctctcctaacagtcatatcctcatccacactttcctcatatttggccttagtatattccccctttgacaagtccttctggctaggacaaatggcaaaattgatgtggcttgaggatgatatccggagtcactgaatatatagaa

SEQ ID NO: 906 - DNA, 601 bp, Human
atatttgttttcgactatcaattaaatcaactcggttcaaacatctagaatcaaaaccatttatgtttacttgtagaaagctttcctctctcctaacagtcatatcctcatccacactttcctcatatttggccttagtatattccccctttgacaagtccttctggctaggacaaatggcaaaattgatgtggcttgaggatgatatccggagtcactgaatatatagaaagaagaatctttcatgaataacctagtgataagtctctctctctctctttttttttttttttttttttttagatggagtttctctcttgttgcccaggctggagtgcaatggcacgatctcagctcaccgcaacctccgcctcccgggttcaagcgattttcctgcctcagcctcccgagtagctgggactacaggcatgagccagcatgcttggctaattttgtatttttggtagaggcgggttttctccatgttggccacaccgacctcgaattcctgacctcaggtgatccgcctgcctcggcctcctgaagtgctgggattacaggcgtgagccactgcacctgcctgtgataagtctcttgtttt

SEQ ID NO: 907 - DNA, 601 bp, Human
tttaggagagtgtgctcactccagtgcgtctgttttaaaacagcgagtgattagttgtgttatggctttagccatcttgcaataaatgtattaggaacagtggtttattgatttagataaatgtatcaggtcctagctatttaacttctttgtgctttagtttgcacatctctaatatgggatactaccacttaactttcataggattcctgagaatcttcagttgaacaacatatataagacaacactcagcaccatttctggcacttggtagttgcttaaccaactgaaatattttttygctattatttttaatttcctcttatgatatcagaactaggttaaaaaaaaaactcccaattttttgcttaaatcaaaagccaggagtcttcttaatttctgtcttctccttacacatcttatctaattcatcagtaaattagagatctgccaatattaacttcaattgggcctcacattttctacttatctttatctctactgctgctatgttgtctgagccaattgtgtacgtggacaactgctgtaagtctacgaactgctttctccgtaaccacattgctcccttcaaggaggacat

SEQ ID NO: 908 - DNA, 601 bp, Human
cagctgtcttaatttgttctttcaacacttggtctttcttccttgacctcctattccataaacttgtaccaaactatacatccatttgaaatatttttggcctggaattttgttcccttttccataattttatacttttttctccctccatgccttctctaagtcattcaccttatctgaaagtataatccctcttcttttggcttagctctgcccttaataacattttacattagttagctctcataactctcagtatatttatgacttttctttatctttttttttttttttttttttkgagatggagtctcactctgttgcccaggctggagtgcagtggcacgatctggggcgatcttggtgcactgcaacctcaacttcccgggttcaagcaattcttctgcctcataactccgcctcccaggttcatgccattctcctgcctcagcctcccgactagctgggactacaggcacccgccactacgcctggctaattttttttgtatttttagtagagacggggtttcaccttgttagccaggatggtcttgatctcccgacctcgtggcctgcccaccttgggctcccaaagtgct

SEQ ID NO: 909 - DNA, 601 bp, Human
tccagcacacatatacttccttctttgaaactttctgccaagtttctttcttttttttttttttttttttttttttttggataaggagtctcgctctgtctccaggctggagtgcagtggggtgatcttggtgcactgcaacctcaacttcccgggttcaagcaattcttctgcctcagcctcccgagtagctgggactacaagtatgcatcaccacacccagctaatttttgtatttttagtagacacgggtttcaccacgttggccaggatggtcttgatctcttgacctcgtgatccrcctgcctcggcctcccaaagtgctgagattacaggcgtgagccaccgcacccggccctgtccagtttcttatgtgtgtgtgtttgttggcaggtgtatgttttatatttattcactatgagtaatttgtatatggatttttacattgattattgaattattttttccttattaaagtaatatttagcattatcttcttaatatcaaattaaatgttcgttaaatagaaataatacaatctatctaaccctttttaaaatttttgtacaggttgagagtgtttattaatacagcatcttaa

SEQ ID NO: 910 - DNA, 601 bp, Human
cccaccttttggagttcccagagtctactgttcctaactgtatgtccatgtctacccaagatttagtgcccacttataagtgagaacatgcaataactggttttctgtgtttgtgttaatttgcataggataatggcctccagttgcatccattctgctgcaaagaacatgatttctttcttctttaaatggctgcatagtattccatggtatatatatatgccatattttctttatcgaatccaccattgatggacaccaaggttgatgccatgtctttgctattgtgaatagagctgckatgaacatacaaatgcatttgtctttttggtaaaatcatttattttcctttgagtacatacctagtaatgggatttctaggtcaagtgggagttctatttttagtgctttgagaaatctccaaactgccttccacagtgactgaactaatttacattcccaccaatagtgtataagcatttccttttctctgcagcttcaccaacatcaatgcagccatatttatttatttatttatttatttatttatttatttatttattttagacggagtctcgctcagccacctgggctggagtgc

SEQ ID NO: 911 - DNA, 601 bp, Human
tagccaatcttaatcatacacacaaatttttacatatattatataatatatgttatatatataatatttatatatattatatattttttatatatatacacacttctgtaaccattgctatgccacataggaaatttccaactacccaaaagtatcactgggctcctaaccaggcaaagattaatttcgcctattttactgtcttgctgtgtatttttctgttgttctctggtatgccattggatgaatatgccacaaataatttaccaaatctactgtcgatggttaattgggtttcccrttttaggctattacaataaagctgtcttgaacatagtttacatgtcttttactggacttgacactcctttctgacgggtatatttccaagagtggaattactggaccataggggatacatgtgtttagctaatattagttttttaaggtataaaatctatttaaaatataaatggaaatatttctattttgtcaattggtaagaatattacactatcatttaaaaggagatagatcaaataatttagaaaagtggtagcagagtctagaaacaactaattccacttgcctttggtcattt

SEQ ID NO: 912 - DNA, 601 bp, Human
gagtgaaaattaacttagaaaacaaaggaaaaaaagaggaatatttgcaaaggccttctggtgcaggagagagcactgttgaacatgaagaaaataaagaaggccagtatagttggagaaaacagtatcatgaagaatattatttgagaggtagtaagggtcaaaataagaatcttgtagataatgcttttgcctttgcctatgttgatgagaagctactgagatattttaagcagggagatggggtaaacagattcacattttgaatatattattctggtggcaggtgaaaaatggattrggtggaggcaaaagtagatacgggaagaccagtcaagagagtattttagtagttcaggcaccagatcatgatagcttaacggaagttactggtagagaatatgagaagagtagattgatttcagagaaattttgagggcaaaatataagggacttcgtaataatttagaaatggcaagtgtgcgagaaattcctcaagaataatttctaagtttctagcttgcctaaatgaatggttggtggtacccatcacagagagagaatataggaagaagaccaaaggttaaatggacactccaac

SEQ ID NO: 913 - DNA, 601 bp, Human
gctgagttggtggaaagtaaggagaattctcagagtccatgaacagcatgaactaacaaatcaagagaagtaagcaagatgaatgtcactgaaacagacattttctctgaagatgtttggaagttcttcactgcatacagcctaggatttacaagaccattttttgtaaacaaatttagtttgggctggcaaaagttggcagatttgactacaaatacctctgcatgaataggatccctgaaagacaatacttattgtgaattaaataagcaaataaaagagacgggggtagggagtagagagagagagagagagagagagagagggagagagagagagagagagcaagagagaatgctcttgagggagatatttggttctgggtgtagtgaaggaaaaggaaagtttcaccagaagaaaattcataacttctcccttatgtaagccatattcatagtacatatgtaacctcaaaacctctaaaggtaaaattttacttttaagtgacacttggttgatagtgtccccaagtactttgcagaagcaagcaaaaatcctgtgacaagaaagcactttaaataaaggtcccacataactctca

SEQ ID NO: 914 - DNA, 601 bp, Human
ttcaaaataatatagattattaaaaatatggtaaaagacagaagactataaaaacaaacagatacatttaaaaaagaaccaaagagcattttgagatatgaagaaaaattaacaaatgaaagttgaaatttattgtatgtgttatacagcagagtagaaatagctgaaaaggaaatttttgaaatagaagatagatctgagaaaattatatagaaggtagagcaaggagacagagctggaaaatacaagagactttaggagatagagaggacagaaagagaaattgcaacatacatctaaytggagagccagaatgaaggaagagaaaaaacatgagtgagatgtttaaagtgataatagttgagttacttttaggattgatgaaagacatggatcttcatattcacataacaaaacaaatcttaagttaattatggtataatcacagaacggcttgatatagtgaaatcgctgaacattgatcgagattttaaaaagcagaaaaagataatatagaaaatagaagacagtagtatatgatagaaatgaatctaaacatatcagtgatcgcaataaatataaattgagttaaattttcaat

SEQ ID NO: 915 - DNA, 601 bp, Human
atatagattattaaaaatatggtaaaagacagaagactataaaaacaaacagatacatttaaaaaagaaccaaagagcattttgagatatgaagaaaaattaacaaatgaaagttgaaatttattgtatgtgttatacagcagagtagaaatagctgaaaaggaaatttttgaaatagaagatagatctgagaaaattatatagaaggtagagcaaggagacagagctggaaaatacaagagactttaggagatagagaggacagaaagagaaattgcaacatacatctaactggagagcmagaatgaaggaagagaaaaaacatgagtgagatgtttaaagtgataatagttgagttacttttaggattgatgaaagacatggatcttcatattcacataacaaaacaaatcttaagttaattatggtataatcacagaacggcttgatatagtgaaatcgctgaacattgatcgagattttaaaaagcagaaaaagataatatagaaaatagaagacagtagtatatgatagaaatgaatctaaacatatcagtgatcgcaataaatataaattgagttaaattttcaattaaaggaga

SEQ ID NO: 916 - DNA, 601 bp, Human
tctaaacatatcagtgatcgcaataaatataaattgagttaaattttcaattaaaggagattatcagacagaaaacaaaacactacaaacaaaatcccacttctgttgtttataggaacacacctaaactaaagaatatagatgctaaggcccggcacagtggctcacgcctgtaatcccagcactttgggaggctgaggggggtggatcacgaggtcaggagtttgagaccagcctggccaacgtggtgaaaccccatctctactaaaaatacaaaaattagctgggtgttgtgtcaggygcctgtaatcccagctactcgggaggctgaggcaggataattgctttaacctgggaggcagagtttgcagtgagccaagatcgcaccattgcactccagcctgggcaacaagagtgaaactccatctcaaaaaaaaaaacaaaacaaaaacaaaatagatgctaagtgcagtggcttacacctgtaatcccagcactgcacttacaacagtggctgaagtaggagtatagctggaaccaaggagttgcagaccagcctgggccacatagggacaccccatctctacagaaataaaaagaa

SEQ ID NO: 917 - DNA, 601 bp, Human
ctaaacatatcagtgatcgcaataaatataaattgagttaaattttcaattaaaggagattatcagacagaaaacaaaacactacaaacaaaatcccacttctgttgtttataggaacacacctaaactaaagaatatagatgctaaggcccggcacagtggctcacgcctgtaatcccagcactttgggaggctgaggggggtggatcacgaggtcaggagtttgagaccagcctggccaacgtggtgaaaccccatctctactaaaaatacaaaaattagctgggtgttgtgtcaggcrcctgtaatcccagctactcgggaggctgaggcaggataattgctttaacctgggaggcagagtttgcagtgagccaagatcgcaccattgcactccagcctgggcaacaagagtgaaactccatctcaaaaaaaaaaacaaaacaaaaacaaaatagatgctaagtgcagtggcttacacctgtaatcccagcactgcacttacaacagtggctgaagtaggagtatagctggaaccaaggagttgcagaccagcctgggccacatagggacaccccatctctacagaaataaaaagaaa

SEQ ID NO: 918 - DNA, 601 bp, Human
taaagaatatagatgctaaggcccggcacagtggctcacgcctgtaatcccagcactttgggaggctgaggggggtggatcacgaggtcaggagtttgagaccagcctggccaacgtggtgaaaccccatctctactaaaaatacaaaaattagctgggtgttgtgtcaggcgcctgtaatcccagctactcgggaggctgaggcaggataattgctttaacctgggaggcagagtttgcagtgagccaagatcgcaccattgcactccagcctgggcaacaagagtgaaactccatctcaaaaaaaaaaacaaaacaaaaacaaaatagatgctaagtgcagtggcttacacctgtaatcccagcactgcacttacaacagtggctgaagtaggagtatagctggaaccaaggagttgcagaccagcctgggccacatagggacaccccatctctacagaaataaaaagaaaaataattagccaggcgtcatgatgtgcctgtagtcccagctactcagaaggttaaggagaggggatagcttgagcccaggaggttgaggctataggttaaaccatgattgtaccaccgcactccaacc

SEQ ID NO: 919 - DNA, 601 bp, Human
aattctgtgtaaacatttagacagttctggggaaaggtacatatttaatgaattgaagcttcaaaagacactaccaatttgccagctctttgaatgagccattttcaaagaagatcccctgccccagtgaagtcttcggatgtctgtactcctgctaacaccttaagtgtaccctgtgagagacctcaaaagagaaccacacggccaaactgctcccaaatttctgacccatagaagctataagaaggccagctccgatggctcatgactctaatctgagcacttttggaagctgaggcargggcatggcttgaggctaagaattagagaccagcctggtcaacatagaaagaccccatctttgcagaagagaaaaagaaaaaaattagccaggcatggtgatgtgcacccatagttttagccactcaggaggctgaggcagaggatcgcttgagcccaagattttgagagtgcagtgagctttgatggggccacagcaccacagcctgggtgacgagagtcagaccctgtctcagaacaaaaaaaaaaaaaaaaaagaaagaaactttaagatcaattttaattgctgttttaggccatt

SEQ ID NO: 920 - DNA, 601 bp, Human
tgccacatatcaaaccatctggaataccactgaagtagaaacaaaaggagaagttaaggccttaacaagcttataatagagaggaaataacagtgcaaatagatgagataaacaactaaagaagtcagaaacagaacaacaaaataaacacaaagaaatagaaggaaagaagtcacaatgataaaaatgtaataaacaaggaaacaataatacaatagcgaatgaaaaatagggagtgaaaaacaacttaaaatttggaaacgcttaacaaaatgattccagaacacaaacaacaaggccaacacacacacacacacacacacacacacacatacacaaatcaggtaagaaaagtggggtataactatgatgcagcaggtattacaatgataatacagggacacgataaatagctttatacctgtacacttaaaacatttaaaatagtagttgtatccacaaaaatataatttctcaaaaataacatttgaagaaatagaaaaacttagtagtctgataaatcattaaggacttgaacccattgtcaaaaatctctccataaagaacatacgaatctgaataaatgatttcacaggtgcat

SEQ ID NO: 921 - DNA, 601 bp, Human
gccacatatcaaaccatctggaataccactgaagtagaaacaaaaggagaagttaaggccttaacaagcttataatagagaggaaataacagtgcaaatagatgagataaacaactaaagaagtcagaaacagaacaacaaaataaacacaaagaaatagaaggaaagaagtcacaatgataaaaatgtaataaacaaggaaacaataatacaatagcgaatgaaaaatagggagtgaaaaacaacttaaaatttggaaacgcttaacaaaatgattccagaacacaaacaacaaggccaccacacacacacacacacacacacacacacatacacaaatcaggtaagaaaagtggggtataactatgatgcagcaggtattacaatgataatacagggacacgataaatagctttatacctgtacacttaaaacatttaaaatagtagttgtatccacaaaaatataatttctcaaaaataacatttgaagaaatagaaaaacttagtagtctgataaatcattaaggacttgaacccattgtcaaaaatctctccataaagaacatacgaatctgaataaatgatttcacaggtgcatc

SEQ ID NO: 922 - DNA, 601 bp, Human
tcaatgatgcctgttttcaccacatcaattcaacattgtactacagactggacccagggcaatggcaagagaaaaagcaacaagttattaggctctgaaaagaaaaaagtaatttttgttgttgttgttttgagacagtctcactctgtcacccaggctggagtgcagtggcatgatctgggctcactgcatcttctgcctcccggattcaagcaattctcctgactcagcctcccaagaagctgggattacaggcatgcaccaccacacccagctaatttttgtatttttagtagagacrgggtttctccatgttagctaggctagtctcgagctcctgacctcaggtgatccacccaccttggtctcccaaagtgttggaattacaggtgtgagccaccacacccagccaaaaaacaaattttaatgttctatagaagataggacttcctattttaaaagatctatagaaaaatttttagtaattttttactataaaatccaaatatggcattcatgtgcatttgtatatatcaatagtctgttgctactgtcttaactttgaaatattctgttataatagcaacataaattataaggt

SEQ ID NO: 923 - DNA, 601 bp, Human
ctagtctcgagctcctgacctcaggtgatccacccaccttggtctcccaaagtgttggaattacaggtgtgagccaccacacccagccaaaaaacaaattttaatgttctatagaagataggacttcctattttaaaagatctatagaaaaatttttagtaattttttactataaaatccaaatatggcattcatgtgcatttgtatatatcaatagtctgttgctactgtcttaactttgaaatattctgttataatagcaacataaattataaggtacctcagaataatgggagaaacrcaagttttttacaagggagagaataaaattgtattgaaaaacattagaagacaaataaattaaaaaatatattgtaaataggaggacactgtttttaaaatgacagttttactcaaattggtttatgatttaatgcaattcctattgtctcaccaggacgtttcatgaaaactgactagctcatctgaacatttatgtggtagatcaaatggacaagaattactgatatgctcttgaaaaagtgggacaaggaaagacctcttgccctatcagatatcaagatctattttaaatctatta

SEQ ID NO: 924 - DNA, 601 bp, Human
acatacagtattgaaggtgaaagcttcttaatctgcataactatttcagaatattgtcttgtcattgcaactgtaccatcagaacattatcttaatgaaacttaaactcccaactattatgtcaatgcaatccttttcagttttacaaatccatagctggttgtttctagtcatcaatgacattgagaaaatacttctttatatcaccagcctatacagtttacacagagattaaaatagttgccaagttagtgatatttttgcattcatccagttcctagctgtatttgttctgtgagtrggtccattatttttcttcattttctgtagtgttttaaagtatgctgtcattgaaaagtgggacttgagctactttctttgcagtggttgcagctatcatttctaacacacttttgatgcagtgtttcactaatgtctcagcaatttttaatgaatttttagctttaacaacaccaactgctttttaaaaccatctatgaattgtttatgtttaaataggaatatgtatagtttcacagattgccagcaattatggctaaaaaactaaatcaaatatatggaagataatgttttatttctt

SEQ ID NO: 925 - DNA, 601 bp, Human
tttcagttttacaaatccatagctggttgtttctagtcatcaatgacattgagaaaatacttctttatatcaccagcctatacagtttacacagagattaaaatagttgccaagttagtgatatttttgcattcatccagttcctagctgtatttgttctgtgagtgggtccattatttttcttcattttctgtagtgttttaaagtatgctgtcattgaaaagtgggacttgagctactttctttgcagtggttgcagctatcatttctaacacacttttgatgcagtgtttcactaatrtctcagcaatttttaatgaatttttagctttaacaacaccaactgctttttaaaaccatctatgaattgtttatgtttaaataggaatatgtatagtttcacagattgccagcaattatggctaaaaaactaaatcaaatatatggaagataatgttttatttctttgaaattgtttatttttcattattttatttagtgttaccactacattctgaaaaggtataccttgtcctgaccaaaattaaaggaaaaaaggtgaagcttatactgctgtcaataaattaaagattaaaactaa

SEQ ID NO: 926 - DNA, 601 bp, Human
tctaaatgcttgctcttcatttctgtacttatcccatcacaaacttgtagcaaacaatcagcgaactggcttgggtccacagaccacacattgatttttgcacctggaaacatacactagaatatttatagcagcactgtttgtaaaagcaaaaattggaaacatcccaaatgtccatttatagtagaatggataaatgcattgtggtatattcacgtgatgatttactataaagtagagaaaataaataaagcattcttgtgtccattaacatagatgaatcttataaacacaatgttcrggaaaaaaatcaagtcagagaagaatgtattacagtaatattttatttatataaagattcaaaagagaaacaactaaatagttaattgttactaaccatagatatgtggttaaaactcaaagaaatgcaagaagttattatcacaggatagaaattaccccagagagtggagattcaatcaagttaaggtacccagggcacatcgaaattactgttcattctctactttatagcctgggtatcgggtatatggatatttgtttcattgttattaaactgaacacatattaaatattcttt

SEQ ID NO: 927 - DNA, 601 bp, Human
atttatagtagaatggataaatgcattgtggtatattcacgtgatgatttactataaagtagagaaaataaataaagcattcttgtgtccattaacatagatgaatcttataaacacaatgttcaggaaaaaaatcaagtcagagaagaatgtattacagtaatattttatttatataaagattcaaaagagaaacaactaaatagttaattgttactaaccatagatatgtggttaaaactcaaagaaatgcaagaagttattatcacaggatagaaattaccccagagagtggagattyaatcaagttaaggtacccagggcacatcgaaattactgttcattctctactttatagcctgggtatcgggtatatggatatttgtttcattgttattaaactgaacacatattaaatattcttttgcatatatattttataataaaattactaaaattataaataggcaagacttttaaaaaatatttttgaaatacatttaaaaacatgtgaatggcccagcgcaatggctcatgcctataatctcagcactgtggaaggccaaggtgggaggatcactgaaccccaggaagtcaaggc

SEQ ID NO: 928 - DNA, 601 bp, Human
gaatggcccagcgcaatggctcatgcctataatctcagcactgtggaaggccaaggtgggaggatcactgaaccccaggaagtcaaggctgcagtgagtcatgattgtgtcactgtctccagcttgggcaacagagagagacctggtctcaattaaaaataaatttaaaaataataaaatatgttaaaaataggaagacattcctagatgggaagataaataatcacaattatgcatttgattcaattccaatcagaaaaataattaaaaattaatacccataaatatttcctaaagcctkcaggagatggggatcattattttatattgagtttgaatatagaaatttgatcatgacaatataaaaacctggtttttaaggtgttcagggataaaaataaaataaaatgcctatattctgtgagtctgccagaacaactatagaacaagtaatgatcagatgaccatgactggaaagcatgacagagcacaggaatgctcaatctcacactctactatgtattgccttcgtgatctgaatgtttgcatctccccaaaattcatgtgctgaaatcttaattctcaagatgatggtattagg

SEQ ID NO: 929 - DNA, 601 bp, Human
ccattggcaatatttttttgtaaagagacagattataaatactgtagaatctggggtctcatatggtttctgttgcagttactctattctgcaattatagaattaaagcagctataaacaacacataaacaaatggttatacctatcttcctataaaattttgtaaatttggtttaattaactaaaaaaacaaatttttggtgtactacatgatgtcttgatatatgcatacactgtagaatgactaggtcaagctacttcatatatgcattatctcagtaatatatatatatttttttcttttttttttttttttgagacggagtctcactctgtcgcccaggctgtagtgcagtggggcgatctcggctcactgcaagctccgcctccagggttcacgccattctcctgcctcagcctcccttgtagctgggactacaggctcccgccaccacgccaggctaatttttttgtatttttagtagagacggggtttcaccgtgttagcccggatggtctcgatctcctgacctcgtgatccgccccccttggcctcccaaagtgctgggattacaggcatgagccaccgcgcccggcctat

SEQ ID NO: 930 - DNA, 601 bp, Human
ggtgtactacatgatgtcttgatatatgcatacactgtagaatgactaggtcaagctacttcatatatgcattatctcagtaatatatatatatttttttcttttttttttttttttgagacggagtctcactctgtcgcccaggctgtagtgcagtggggcgatctcggctcactgcaagctccgcctccagggttcacgccattctcctgcctcagcctcccttgtagctgggactacaggctcccgccaccacgccaggctaatttttttgtatttttagtagagacggggtttcacygtgttagcccggatggtctcgatctcctgacctcgtgatccgccccccttggcctcccaaagtgctgggattacaggcatgagccaccgcgcccggcctatctcaataatattttttgttgtgagatttatgatactggtttgagaaatgaagaatagttaaaatctacttaaaatctattctcagcaatttttaagagtacaacatattgttactaactatagccccccgatgtatgtatattcttcctgtgtaactaaaattttgtgtcctttgacaacaaatatctccccaatcctt

SEQ ID NO: 931 - DNA, 601 bp, Human
atatatgcatacactgtagaatgactaggtcaagctacttcatatatgcattatctcagtaatatatatatatttttttcttttttttttttttttgagacggagtctcactctgtcgcccaggctgtagtgcagtggggcgatctcggctcactgcaagctccgcctccagggttcacgccattctcctgcctcagcctcccttgtagctgggactacaggctcccgccaccacgccaggctaatttttttgtatttttagtagagacggggtttcaccgtgttagcccggatggtctcsatctcctgacctcgtgatccgccccccttggcctcccaaagtgctgggattacaggcatgagccaccgcgcccggcctatctcaataatattttttgttgtgagatttatgatactggtttgagaaatgaagaatagttaaaatctacttaaaatctattctcagcaatttttaagagtacaacatattgttactaactatagccccccgatgtatgtatattcttcctgtgtaactaaaattttgtgtcctttgacaacaaatatctccccaatccttttattccccaccaccttagcc

SEQ ID NO: 932 - DNA, 601 bp, Human
tacatgatttatagactattttattcctaacacaacctcaaggtttgtacacatttattgtcttcactttccaaataagtatctttttaatgagtttcaagactaatgtggctgggcacgttggctcacgcctgtaatcacagcactttgggagcccgaagcggggggatcatgaggtcaggaaatcgagaccatcctggctaacacggcgaaaccccgtctctactaaaaatacaaaaaattagccgggcatggtggcgggcgcctgtagtcccagctacttgggaggctgaggcagggwaatggcgtgaacccgggaggcggagcttgcagtgagacgagatcgtgccactgcactccagcctgggcaacagagtgagactccgtctcaaaaaaaaaaaagaaaagaaaaagactaatgtatgcaattagtaactgtttgagccatgattccacatcaggcagtcctattttaaagcctatgctcttcactattagataatcaaaatatgaacacttttatgaagagtgaatatgtttgcttttccacttgaatgagagattattgaaggcactctctattattaattttggttcttga

SEQ ID NO: 933 - DNA, 601 bp, Human
acatgatttatagactattttattcctaacacaacctcaaggtttgtacacatttattgtcttcactttccaaataagtatctttttaatgagtttcaagactaatgtggctgggcacgttggctcacgcctgtaatcacagcactttgggagcccgaagcggggggatcatgaggtcaggaaatcgagaccatcctggctaacacggcgaaaccccgtctctactaaaaatacaaaaaattagccgggcatggtggcgggcgcctgtagtcccagctacttgggaggctgaggcagggawatggcgtgaacccgggaggcggagcttgcagtgagacgagatcgtgccactgcactccagcctgggcaacagagtgagactccgtctcaaaaaaaaaaaagaaaagaaaaagactaatgtatgcaattagtaactgtttgagccatgattccacatcaggcagtcctattttaaagcctatgctcttcactattagataatcaaaatatgaacacttttatgaagagtgaatatgtttgcttttccacttgaatgagagattattgaaggcactctctattattaattttggttcttgag

SEQ ID NO: 934 - DNA, 601 bp, Human
catgatttatagactattttattcctaacacaacctcaaggtttgtacacatttattgtcttcactttccaaataagtatctttttaatgagtttcaagactaatgtggctgggcacgttggctcacgcctgtaatcacagcactttgggagcccgaagcggggggatcatgaggtcaggaaatcgagaccatcctggctaacacggcgaaaccccgtctctactaaaaatacaaaaaattagccgggcatggtggcgggcgcctgtagtcccagctacttgggaggctgaggcagggaactggcgtgaacccgggaggcggagcttgcagtgagacgagatcgtgccactgcactccagcctgggcaacagagtgagactccgtctcaaaaaaaaaaaagaaaagaaaaagactaatgtatgcaattagtaactgtttgagccatgattccacatcaggcagtcctattttaaagcctatgctcttcactattagataatcaaaatatgaacacttttatgaagagtgaatatgtttgcttttccacttgaatgagagattattgaaggcactctctattattaattttggttcttgagc

SEQ ID NO: 935 - DNA, 601 bp, Human
atgatttatagactattttattcctaacacaacctcaaggtttgtacacatttattgtcttcactttccaaataagtatctttttaatgagtttcaagactaatgtggctgggcacgttggctcacgcctgtaatcacagcactttgggagcccgaagcggggggatcatgaggtcaggaaatcgagaccatcctggctaacacggcgaaaccccgtctctactaaaaatacaaaaaattagccgggcatggtggcgggcgcctgtagtcccagctacttgggaggctgaggcagggaaacggcgtgaacccgggaggcggagcttgcagtgagacgagatcgtgccactgcactccagcctgggcaacagagtgagactccgtctcaaaaaaaaaaaagaaaagaaaaagactaatgtatgcaattagtaactgtttgagccatgattccacatcaggcagtcctattttaaagcctatgctcttcactattagataatcaaaatatgaacacttttatgaagagtgaatatgtttgcttttccacttgaatgagagattattgaaggcactctctattattaattttggttcttgagca

SEQ ID NO: 936 - DNA, 601 bp, Human
gatttatagactattttattcctaacacaacctcaaggtttgtacacatttattgtcttcactttccaaataagtatctttttaatgagtttcaagactaatgtggctgggcacgttggctcacgcctgtaatcacagcactttgggagcccgaagcggggggatcatgaggtcaggaaatcgagaccatcctggctaacacggcgaaaccccgtctctactaaaaatacaaaaaattagccgggcatggtggcgggcgcctgtagtcccagctacttgggaggctgaggcagggaaatgacgtgaacccgggaggcggagcttgcagtgagacgagatcgtgccactgcactccagcctgggcaacagagtgagactccgtctcaaaaaaaaaaaagaaaagaaaaagactaatgtatgcaattagtaactgtttgagccatgattccacatcaggcagtcctattttaaagcctatgctcttcactattagataatcaaaatatgaacacttttatgaagagtgaatatgtttgcttttccacttgaatgagagattattgaaggcactctctattattaattttggttcttgagcaca

SEQ ID NO: 937 - DNA, 601 bp, Human
agcttgcagtgagacgagatcgtgccactgcactccagcctgggcaacagagtgagactccgtctcaaaaaaaaaaaagaaaagaaaaagactaatgtatgcaattagtaactgtttgagccatgattccacatcaggcagtcctattttaaagcctatgctcttcactattagataatcaaaatatgaacacttttatgaagagtgaatatgtttgcttttccacttgaatgagagattattgaaggcactctctattattaattttggttcttgagcacatggcctggtctatattagrtagatttagaataaattaatgaggaaatgaatgattatgtaaatttaaaaaggttaagtgattgctaaagttcacctagagaatagcaatcatgtcaggccttcttaactttagtttcctattttctgtgacaggctgttctaatatctgtaaccagactccttgtttcaggacagtaggcatatgcctgtgctgttccttgccagaagcagaatggcaccaagactaattacacttatttgagcctcctggtgagaggtgaagccagctggacttcctgggtggagtggggacttggag

SEQ ID NO: 938 - DNA, 601 bp, Human
agtctcactctattgcctaggctggagtgcagtggcatgatcataactcactgcagcctcaactgcctggatttaagcgattcccccacttcaggctcctgagtagctgggaccccagacgtgtgccaccatgcccaaaaaaataaaaaaaaaattatttgtagagatgaggtctcactatattgcccaggctggtcttgaactcctcagctacagcaatccttctgcctcagcttcccaaagtactaagataaggtgtgagcacctggcctaagaatattttaactagttaatttggttmaatatttataatagtctctaatatatccagaacagatccattggctaatgaattgattcagtcatttaccaagcatctgaagcattcagaacagatcctcaggctctttattatagctgtagactttaatccagttgtaaagaggacccacatacatcagttttaaaaacaaggaaccacacctcttacataccacataatctaaaagaaagtgatcagatgaagatttgtattaatgctctggcaccatgttccttatttgacataatcaggtggttccttgacttgtcaggtggcttt

SEQ ID NO: 939 - DNA, 601 bp, Human
tgtagagatgaggtctcactatattgcccaggctggtcttgaactcctcagctacagcaatccttctgcctcagcttcccaaagtactaagataaggtgtgagcacctggcctaagaatattttaactagttaatttggttaaatatttataatagtctctaatatatccagaacagatccattggctaatgaattgattcagtcatttaccaagcatctgaagcattcagaacagatcctcaggctctttattatagctgtagactttaatccagttgtaaagaggacccacatacatcrgttttaaaaacaaggaaccacacctcttacataccacataatctaaaagaaagtgatcagatgaagatttgtattaatgctctggcaccatgttccttatttgacataatcaggtggttccttgacttgtcaggtggctttatatgatccttaagatagaagggagattggtcactgtggctatacaccttatgcctattcctctatacacctctgagataaatatttttaacactgttatttaactaaactgaacgtgtccaggatgagacagcaagtaacatggtatcataattaaaa

SEQ ID NO: 940 - DNA, 601 bp, Human
ctgcctcagcttcccaaagtactaagataaggtgtgagcacctggcctaagaatattttaactagttaatttggttaaatatttataatagtctctaatatatccagaacagatccattggctaatgaattgattcagtcatttaccaagcatctgaagcattcagaacagatcctcaggctctttattatagctgtagactttaatccagttgtaaagaggacccacatacatcagttttaaaaacaaggaaccacacctcttacataccacataatctaaaagaaagtgatcagatgargatttgtattaatgctctggcaccatgttccttatttgacataatcaggtggttccttgacttgtcaggtggctttatatgatccttaagatagaagggagattggtcactgtggctatacaccttatgcctattcctctatacacctctgagataaatatttttaacactgttatttaactaaactgaacgtgtccaggatgagacagcaagtaacatggtatcataattaaaacctgagtctatgtgactctaatgacattcccctagattttactaaggattatttgagtagagagg

SEQ ID NO: 941 - DNA, 601 bp, Human
gacatttactgtagacagggatgcaggaatgtatgttaattacatataatattatgtgtgcgtgtgtgtgtgtatgtttatattgtgaggagtgagatgatggtcctttgcagtagagaacaaaaaagaaagataccaattttgaggaaaatgtaatgagttattctgttttttatatatatttaattttttgtagaggcaaagtctcactatattgcccaggctggtctcaaactactgggtccaagagatcctttcacttccaaagtgcttggattacagagtgagccaccatgccaarcttcagttatgtcttaagactagcctgctcactggtaggtggttaggtttagatatgtacatttaggaggtaataataaaagtagctgctcctattgtacatacaatcactgaatgaatgtatatagagataaggaaatagataagagagggttaaataccccgtcttggattaagaataagaggaaaatgtgaaacccactaaggagatgagaaaggaaaaaaatcagcagaaagaagactactgttggtttatgtttaatggtctaactcttttttttttttttttttttacttctaa

SEQ ID NO: 942 - DNA, 601 bp, Human
acacaaagagaaaaaaacaaacctaaaaagagttcctgaaaatgactagtaactaagtggtttgaaagagttaatattgtttcctacaggcctgattaataaagacattacctatccctatattgaaaaagtggacatggtttctagttctgtttcaggttgatttatgtggggagagtgtgatgacatttatgtactaaatacttagtgcttttaattcagtttacatttaatctataaatgcaaaccatgttaaaggatgcttgacaaaaataaacttgaaagccagcattaaccttcsaaaccagctgaaggtgcttaaaagacaataagggtaaaatttcattatacagacttcaagtgggtttttaaaaaatctatagactttccaactaaaatgatgaatgctgttctgattctaattgacaagtgttatatataaaagagttcttgccttcattcttatcaaaactgtggggatttccaatgataggacaatattatgtgggtggaaacttctcagaagaatagagaacttatcagtatttacttaggttctattacattcagagccataaaagaaactacactcataaattta

SEQ ID NO: 943 - DNA, 601 bp, Human
aaagagttcctgaaaatgactagtaactaagtggtttgaaagagttaatattgtttcctacaggcctgattaataaagacattacctatccctatattgaaaaagtggacatggtttctagttctgtttcaggttgatttatgtggggagagtgtgatgacatttatgtactaaatacttagtgcttttaattcagtttacatttaatctataaatgcaaaccatgttaaaggatgcttgacaaaaataaacttgaaagccagcattaaccttccaaaccagctgaaggtgcttaaaagayaataagggtaaaatttcattatacagacttcaagtgggtttttaaaaaatctatagactttccaactaaaatgatgaatgctgttctgattctaattgacaagtgttatatataaaagagttcttgccttcattcttatcaaaactgtggggatttccaatgataggacaatattatgtgggtggaaacttctcagaagaatagagaacttatcagtatttacttaggttctattacattcagagccataaaagaaactacactcataaatttatagacagtcaaggatattgcctcttc

SEQ ID NO: 944 - DNA, 601 bp, Human
ttcctatttctgctgtcacaaattaccacgaactgagtgttgtgaacaacacaaatctattattttacagctcgaggtcagaagtacaaaaggggttttactgggctaaaatcaaggtgtcaacaggggtgcattcctctgaagaagccaggaaaatctttttccttcccttttttagcttccagggtcttcctccattttttggctccattccttggccccttccgccatcttccttcttcaaagcccacaatttcattacccaacctcagcttctgctattacatctccttttctgacmcttcttcctctctttttcatcctttaaggacccttgcgattatatcagacccacttagataatccaggacaatctcctctatttcaaaacccttaatcacatctgcaaagtcacttttgacatttaaggtaacattcagtttctaggcattagggcaactgtgagaggccattattctgcctactacaaaagctaaagatctgggtaagtatagtgcagttgtgtgcatacagcagttctcctttatctgtgggggatatgtcccaagaccccaagtagatgcctgaaaccatgaatagc

SEQ ID NO: 945 - DNA, 601 bp, Human
ttattctgcctactacaaaagctaaagatctgggtaagtatagtgcagttgtgtgcatacagcagttctcctttatctgtgggggatatgtcccaagaccccaagtagatgcctgaaaccatgaatagcactgaactctgtatatattatgtttttttcctatacatacatacttatcataaagtttaatttataaattaggcatagtaaaagattaacaacaattgctaataataaaacaggacaatcacaacaatatactgtaatagaagtcatgtgaatatggtctctttaaaaaaatataaatatataaatatataaatataaatatatatatatatatatttttttttagatggagttttgctcttgttgcccaggctggagtgcagtggtgccatctcagctcactgcaacctccgcctcctgggttcaagcaattctcctgcctcagcctcccaagtagttgggattacaggcatgcaccaccatggctgtctaattttgtatttttagtagagatggggtttctccatgttggtcaggctggtctcgaactcccaacttcaggtaatctgcctgccttggactcccaaagtgc

SEQ ID NO: 946 - DNA, 601 bp, Human
tgcagttgtgtgcatacagcagttctcctttatctgtgggggatatgtcccaagaccccaagtagatgcctgaaaccatgaatagcactgaactctgtatatattatgtttttttcctatacatacatacttatcataaagtttaatttataaattaggcatagtaaaagattaacaacaattgctaataataaaacaggacaatcacaacaatatactgtaatagaagtcatgtgaatatggtctctttaaaaaaaaataaatatataaatatataaatataaatatatatatatatatwtttttttttagatggagttttgctcttgttgcccaggctggagtgcagtggtgccatctcagctcactgcaacctccgcctcctgggttcaagcaattctcctgcctcagcctcccaagtagttgggattacaggcatgcaccaccatggctgtctaattttgtatttttagtagagatggggtttctccatgttggtcaggctggtctcgaactcccaacttcaggtaatctgcctgccttggactcccaaagtgcagggattacaggtgtgagccactgcgacaggcctaaaatatct

SEQ ID NO: 947 - DNA, 601 bp, Human
gtgttaactgcaactgcagaaaacgaaaccttggataagggaagactgttgtattttgatattaatatgtcaatataatttagtagagaaaaaatacaatcacagagattaatgatcactacaatgattacggtagtgtaatataatagaaatagctttgaatctggaaaaattctggcttcatcatttactaactgtataacatcagataaatatcttagtgttgtctctttagaggtgatgtggtggtgagttataaggaatgttgttccttctccttcatttttagaaaataacaaakatagagaaggcagacaatatagtacatgttgtacttagatgttataagtaatgtctaataataattacatttgcaaaaactattttctaaatatattaaacattttgtgggccttatttttattttacaaataatattctgctgctcaatgtgctctttttgttcctcctctgatattcaatgtctgcttgtttttttgttttttttttttctgtaatgcctcttaaatttaggaatctgaattaattcattagcttgatgatggctttttctcattccattttaggaacttaattttta

SEQ ID NO: 948 - DNA, 601 bp, Human
aacatcagataaatatcttagtgttgtctctttagaggtgatgtggtggtgagttataaggaatgttgttccttctccttcatttttagaaaataacaaagatagagaaggcagacaatatagtacatgttgtacttagatgttataagtaatgtctaataataattacatttgcaaaaactattttctaaatatattaaacattttgtgggccttatttttattttacaaataatattctgctgctcaatgtgctctttttgttcctcctctgatattcaatgtctgcttgtttttttgttttttttttttctgtaatgcctcttaaatttaggaatctgaattaattcattagcttgatgatggctttttctcattccattttaggaacttaatttttagcatgtaattttctgtattgttgtttgctggtataggtgtacaactagtattttttatgaaaaacaaatcctgcattagccttttaaaaatcatttataaaataaatcccaacctcatattataggaaagttatgatataaagtatcacctctgcctcgtcattccctcactttgatcccattctcagagggaactccta

SEQ ID NO: 949 - DNA, 601 bp, Human
agagacggggtttctccatgttggtcaggctggtcttgaattcccaacctcaggtgatccacctgcctcaacctctgaaagtgctgggattacaggtgtgagccaccgtgcccggacacattgactttaaagttggaaatgtatgaacaacattgccaaaccacaaatattatttgatgctgagtcacatagtgtactatgttctttgaagtagtttcactctcaggaaacctagggcactcatgggaacaagttcaccatgtgaaaatggattctctctcttttttttttaactcaattkcttgaaatcatttcaaatttacattttctttagatttatatttacttaatataataccattccaaatttacttgtatttgctttatttgattttgaaagtttcatgcagatttgtttttatcctgaaatatcaaattgtctttcattttgtttcctgcactaaatttgcctttatcttatcctcagttttttaccccctcaaagttttatattgtctcagattttttccccttggaaatgtccttcatggagctctctatattgttccttcttcattcagaatgtgtggcctctttaatc

SEQ ID NO: 950 - DNA, 601 bp, Human
gagacggggtttctccatgttggtcaggctggtcttgaattcccaacctcaggtgatccacctgcctcaacctctgaaagtgctgggattacaggtgtgagccaccgtgcccggacacattgactttaaagttggaaatgtatgaacaacattgccaaaccacaaatattatttgatgctgagtcacatagtgtactatgttctttgaagtagtttcactctcaggaaacctagggcactcatgggaacaagttcaccatgtgaaaatggattctctctcttttttttttaactcaattgyttgaaatcatttcaaatttacattttctttagatttatatttacttaatataataccattccaaatttacttgtatttgctttatttgattttgaaagtttcatgcagatttgtttttatcctgaaatatcaaattgtctttcattttgtttcctgcactaaatttgcctttatcttatcctcagttttttaccccctcaaagttttatattgtctcagattttttccccttggaaatgtccttcatggagctctctatattgttccttcttcattcagaatgtgtggcctctttaatct

SEQ ID NO: 951 - DNA, 601 bp, Human
taaagggtggtaaaccttgttttctaatccttgtctggattagggtagaatagaggcacaacagtgtctgcctacatttcctaaggcatccttcaatagagggagtagtcatcttgtttatcctaactggaactcttgtttttggttgacttcctaagatgtcagtaagggatgatatggtattatgagaacttacagatagcctcatataggattctacagatcctacagctaacccatgtagcctcatatagactctatgcaaaaattgttaaagtttaagataatatacataactagcataatatataatgctcacaaattagatgatttcataaatcatggttgtcaactctttgcaatttcatcaataaagttatagtgtttccagtgaaaagccaagcatgatttttagtgaatattaataagctcatgctaaacatctctatgccaatcaaaggcataagaaagtcaagaaaatcttgaaggcaatattttatctgcttttatgcatgtatggcacattttataggtttaaaaaattaaaataaacaaataaatagaaccaattatataaccagaaagaagtttcagagactaa

SEQ ID NO: 952 - DNA, 601 bp, Human
gtagaaagacaacaaaagtatgaaataaaaaacaggagaaaaagaaaactaatttaggaagtacaactagtagaaataagaacaagaaagtgaaagcaaagaaatgggaaagaagaactgatcagaggggaaaaaagaaaaactagaaaatattttcaaagtttaccaggacatgtttcaaaattgaactttcttgactaactcaattctttctttacttattctgcttctaaaccttcctagaatcctccttctattggaaatgaaggaagcagcctgggataatagactcttcactttkttccttcctagtcacaggttatgtgtgtgtgtttgtgtgcatctgatgaaataatatatacagagtaaatatgtatgaaaattaggaaaaggccagtatttatttattagcttcttttacctttactatcatttttaatatctgttctttagtcagtttaaggaaatatcaagtagaggctcattatactccaaaatgcaaatatgtttctgagactttaaacaccacattgtctaacttcataatgctagaattctgttcctttatactcataccaaaattttcttttttcagggatta

SEQ ID NO: 953 - DNA, 601 bp, Human
ccaagtagctgggactacaggtgcctgccaccatgcctggctaatttttgtattttttgtagagatggggttttgccacgtggcccattctggtcttgaactcctgggctcaagcagtctgcctaactcaagattcctaaagtgctgggactacaggtgtgagccactgcacctggcctgaccattcattctgtatcttctatgttgttgttgttttttaatttgaggagtatactttttcttttattttttcgttaaatagttccttagaatattttcagtcttacataatcttcctatwcattctcatttgttttcttgatgtaagatgatttctaggtttttggttttccctatgaccagctcacatatgtccctgagacagtttctctactaaagcatttatttatttattcaagaaatgtgtgagtgcaaattatgtgctaaacattttagcaacacattctttcttctgctgtccttaacctgcactccatttcactggaatggccacattcctattatcattcagtactcactagttcacattagaaattttatattcgcaaacagggctgagtgcggtggctcatgcctgtaa

SEQ ID NO: 954 - DNA, 601 bp, Human
ctatacattctcatttgttttcttgatgtaagatgatttctaggtttttggttttccctatgaccagctcacatatgtccctgagacagtttctctactaaagcatttatttatttattcaagaaatgtgtgagtgcaaattatgtgctaaacattttagcaacacattctttcttctgctgtccttaacctgcactccatttcactggaatggccacattcctattatcattcagtactcactagttcacattagaaattttatattcgcaaacagggctgagtgcggtggctcatgccygtaatcccaacactttgggaggctgaggcaggcagatcacgaggtcaggagatggaggccattctggccaacatggtgaaaccctgtctctactaaaatacaaaaaatcagctgagcgtggtggcacacacctgtagtcccaactactggggaggctgagagaggggaatcacttgaacctgggaggcggaggttgcagtgagtggagatcgtgccagtgcactccagcctggcaacagagcaagactctgtctcaggaaaaaaaaaaaaaaggaattttatattagcaaacagcacact

SEQ ID NO: 955 - DNA, 601 bp, Human
agacagtttctctactaaagcatttatttatttattcaagaaatgtgtgagtgcaaattatgtgctaaacattttagcaacacattctttcttctgctgtccttaacctgcactccatttcactggaatggccacattcctattatcattcagtactcactagttcacattagaaattttatattcgcaaacagggctgagtgcggtggctcatgcctgtaatcccaacactttgggaggctgaggcaggcagatcacgaggtcaggagatggaggccattctggccaacatggtgaaacyctgtctctactaaaatacaaaaaatcagctgagcgtggtggcacacacctgtagtcccaactactggggaggctgagagaggggaatcacttgaacctgggaggcggaggttgcagtgagtggagatcgtgccagtgcactccagcctggcaacagagcaagactctgtctcaggaaaaaaaaaaaaaaggaattttatattagcaaacagcacactgaagtcacaaatttttatctatccatatattttacttccttcttctagacatcaagaaaagtaattatttttttttaaaatgt

SEQ ID NO: 956 - DNA, 601 bp, Human
cctgcactccatttcactggaatggccacattcctattatcattcagtactcactagttcacattagaaattttatattcgcaaacagggctgagtgcggtggctcatgcctgtaatcccaacactttgggaggctgaggcaggcagatcacgaggtcaggagatggaggccattctggccaacatggtgaaaccctgtctctactaaaatacaaaaaatcagctgagcgtggtggcacacacctgtagtcccaactactggggaggctgagagaggggaatcacttgaacctgggaggcrgaggttgcagtgagtggagatcgtgccagtgcactccagcctggcaacagagcaagactctgtctcaggaaaaaaaaaaaaaaggaattttatattagcaaacagcacactgaagtcacaaatttttatctatccatatattttacttccttcttctagacatcaagaaaagtaattatttttttttaaaatgtcattcccagatgactctaatcagatctacctctgtgcactgttgaaacagaatccagagtcctaatctggaccatggaaactgagttgctaggacggacttacaga

SEQ ID NO: 957 - DNA, 601 bp, Human
ctttcccattcaccactcaaactacatggaatactgacgtcaaaactctcactttttagatgattctcttactatctgaatatcacctacattgccttctccactcagcaaagcctgattcatcttccagagcaaagtagggtgtaatctttgctcttaagcctttcaggattctcttacgaagtcagtggccttctcctggcattctcactgcattctgcacaactacccattcaagaattgtttcatggattctttacatttgattataaaagcattaaaagatcctcataaaaatcaraggacatataaagtgtaaagaagaaaatataatcactgttcttggcttaagagaatacagttaacattttggtactatatttttatggcaggattacctcatttaacaatatagcatagcatttttccaattgtagtctattataaaaattaattttgctgtttctctccccccacagattgttcattcctttaaggatcatcatttttcattttacaccttatttccagtgcttggtacaatccttggcaaataggacacatttaattaacagttgtgtgaatgttaaatgaaatggga

SEQ ID NO: 958 - DNA, 601 bp, Human
ttatggtccttgtcacaactgtatggcttttaatcactcatacattcagtgagttactgcactgctggaaccttaataacgttctagtttgtttggatgatcttcctgataaagtcctgacaatctctcagtataatggaaagacaatcaaaataaaaaatgctttaagagttcaggtagtggagcatactattatttttcacacagtgcaaggatattaaaatactgactttcattcatttgattgagttggtgatgaaatccaagaaaaattgaaaatttgaattattctactgccagkagggactgtatatcatgaacagaaaagcaggcatatgtaactgactcttgtagcataatctgaaaagtgtcagcttgccctccttttatatgaatttctgcagtatatctaagcaattaattcattatatagctctcatatttgcaatcaccacctggaattttataaaaatataaaatgtcatcttcaatatacatagtttgaatagttaaaatgacgtcttacattgatagagtgtttcagttttttcaagatgctttctgttaaagtatctcatttgactcaacagccctctgaaag

SEQ ID NO: 959 - DNA, 601 bp, Human
ctactgccagtagggactgtatatcatgaacagaaaagcaggcatatgtaactgactcttgtagcataatctgaaaagtgtcagcttgccctccttttatatgaatttctgcagtatatctaagcaattaattcattatatagctctcatatttgcaatcaccacctggaattttataaaaatataaaatgtcatcttcaatatacatagtttgaatagttaaaatgacgtcttacattgatagagtgtttcagttttttcaagatgctttctgttaaagtatctcatttgactcaacagycctctgaaagtaagtagtggaactctgataattctccagcctgttccataccctttgcctccttccttcttattaatttccaatttatctttctttcttttaaaggaggcagtttggtgtgatggaaagagcatagaatatgaattcagatatttagctctatccttgtcttgaattactttgacattggagggatcattttcagttctctgaaccttggttttctaattggcaaaataataatgatgctaaagtgtactcccaatgttgtgaggattaattaaggtgaaattggggaaa

SEQ ID NO: 960 - DNA, 601 bp, Human
agcaggcatatgtaactgactcttgtagcataatctgaaaagtgtcagcttgccctccttttatatgaatttctgcagtatatctaagcaattaattcattatatagctctcatatttgcaatcaccacctggaattttataaaaatataaaatgtcatcttcaatatacatagtttgaatagttaaaatgacgtcttacattgatagagtgtttcagttttttcaagatgctttctgttaaagtatctcatttgactcaacagccctctgaaagtaagtagtggaactctgataattctmcagcctgttccataccctttgcctccttccttcttattaatttccaatttatctttctttcttttaaaggaggcagtttggtgtgatggaaagagcatagaatatgaattcagatatttagctctatccttgtcttgaattactttgacattggagggatcattttcagttctctgaaccttggttttctaattggcaaaataataatgatgctaaagtgtactcccaatgttgtgaggattaattaaggtgaaattggggaaaccttaaaagagcaaatgtaacattcatgttagcttc

SEQ ID NO: 961 - DNA, 601 bp, Human
agtatctcatttgactcaacagccctctgaaagtaagtagtggaactctgataattctccagcctgttccataccctttgcctccttccttcttattaatttccaatttatctttctttcttttaaaggaggcagtttggtgtgatggaaagagcatagaatatgaattcagatatttagctctatccttgtcttgaattactttgacattggagggatcattttcagttctctgaaccttggttttctaattggcaaaataataatgatgctaaagtgtactcccaatgttgtgaggatkaattaaggtgaaattggggaaaccttaaaagagcaaatgtaacattcatgttagcttcttttaagggcagcttgggatgatggaaagagaacagatctttgcttcatggcttcttacttatggtacttgagcaagtaatctaccctttctgagcttcatttttctaagtgtgaaatgggtataacaatacctgtcttgtgaagctgctgaaagataaggtgacatatatgctgattctagcatagttcctaactcagagtcatatatcctattgaaagtgtttccctttctttcatcctt

SEQ ID NO: 962 - DNA, 601 bp, Human
agtagtggaactctgataattctccagcctgttccataccctttgcctccttccttcttattaatttccaatttatctttctttcttttaaaggaggcagtttggtgtgatggaaagagcatagaatatgaattcagatatttagctctatccttgtcttgaattactttgacattggagggatcattttcagttctctgaaccttggttttctaattggcaaaataataatgatgctaaagtgtactcccaatgttgtgaggattaattaaggtgaaattggggaaaccttaaaagagcwaatgtaacattcatgttagcttcttttaagggcagcttgggatgatggaaagagaacagatctttgcttcatggcttcttacttatggtacttgagcaagtaatctaccctttctgagcttcatttttctaagtgtgaaatgggtataacaatacctgtcttgtgaagctgctgaaagataaggtgacatatatgctgattctagcatagttcctaactcagagtcatatatcctattgaaagtgtttccctttctttcatccttcctccctacctcttaccactcctctttcccacctc

SEQ ID NO: 963 - DNA, 601 bp, Human
tccttccttcttattaatttccaatttatctttctttcttttaaaggaggcagtttggtgtgatggaaagagcatagaatatgaattcagatatttagctctatccttgtcttgaattactttgacattggagggatcattttcagttctctgaaccttggttttctaattggcaaaataataatgatgctaaagtgtactcccaatgttgtgaggattaattaaggtgaaattggggaaaccttaaaagagcaaatgtaacattcatgttagcttcttttaagggcagcttgggatgatrgaaagagaacagatctttgcttcatggcttcttacttatggtacttgagcaagtaatctaccctttctgagcttcatttttctaagtgtgaaatgggtataacaatacctgtcttgtgaagctgctgaaagataaggtgacatatatgctgattctagcatagttcctaactcagagtcatatatcctattgaaagtgtttccctttctttcatccttcctccctacctcttaccactcctctttcccacctcctgtctttccactttactcttcatcctcctatctcaactttgtgtga

SEQ ID NO: 964 - DNA, 601 bp, Human
ttttttctaaagaaaattgtaattttcagttgaggcaggagatggggattcaagttctccctccttttgagaaaagaccccttcctggcccactttgaaatctccattgaatcctgtaaactttgtgcagtagaatttggaaaaccactggtgtagccgaaccctctcaacttgcagatggaaaaactgaatttgagggaagttgagatacttgcctaagctcgtgaggctgggaagtggtgagctaagactagaactcagtcgttctttgccttaccctattcccttagtaagtaaagayacagagtgcaaatatgtataatcagattcatctcttgaaagatgttacagtctatttgtgtagatggaactcacattaaaagatgaggaaagtaaagtagtatgatataacaatgaaatgggtgaaataggtaaatccattaagaagagacgggcatggatgatcactgttttggggggctggacactgcaaactttatgagggcaggaatttctttgctgtgctcattattattttattcccagtgcgtagagaagtgcctggtttcctatagggaattaatactttttaaaaattaaa

SEQ ID NO: 965 - DNA, 601 bp, Human
ttaaactttcaggagtgattcactcggattggaactggggggagtagacagagaacgatgcaaaagaggcagcacagggtaggaaagttatggctttaactggtgacacctggtaaagaaaaccagtttcttgggcacggtttgggtagatgaggttaaaaaaaaaaagtgaatgtgtgatgacaaaatggagaccaaattgtgaacaatttcacagaagggctgtctgagaaaaaaacaaacggaaacaaaaaacaaaacaaagaaagcattaagagaacaaaaagtaggagttaggagaaggttaggatggaggtgaaaatctttgtggtcaactagggatagtcaatagagatctctagacattgatgagaaattaaagaaggccagaaggtctttaaaaagattactttgaaagaaagagattccttctcccctgaaatctagctattaagaccagaggggatgggagggatactggatatagataacaaaacttaaacagttaataaatgcttctttctttaatttgaacactgactagaacagcagttttaatcaacaatgtggcattagcctactacttttgtgttagtaacaa

SEQ ID NO: 966 - DNA, 601 bp, Human
cttgacctcatgatctgcctgcctggacctcccaaagtgctgggattacaggtgtgagccactgtgcctggcctattatttattaattaattaatttattttttgagacggagtcttgctctgtcttccaggctggagtgcagtggtgtgatctcggctcagtgccaacctctgcctcccgggttcaagcgattctcctgcctcagcctcccgagtagctgagactactggtacatgccaacacgcccagctaatttttgtatttttagtagacacaagctttcaccatgttggccaggawggtctcaatctcttgacctcgtgatctgcccgcctgggcctcccaaagtgttgggatcacaggcgtgagccactgtgcctggccaaataattattttttaaaaaaaccatggcttaagttatttatttttaaaaggaagccaaatagtacccctctgttgtttattaaaggaaatatatgacattatagatgtcctgtgagcacatgtgtatatgagtctatataattaagagaaagatagaacatgagcctatgcatgtttatgtgtgtgcgtgtatttatatttatgtatgtgtgtgt

SEQ ID NO: 967 - DNA, 601 bp, Human
ttttgagacggagtcttgctctgtcttccaggctggagtgcagtggtgtgatctcggctcagtgccaacctctgcctcccgggttcaagcgattctcctgcctcagcctcccgagtagctgagactactggtacatgccaacacgcccagctaatttttgtatttttagtagacacaagctttcaccatgttggccaggatggtctcaatctcttgacctcgtgatctgcccgcctgggcctcccaaagtgttgggatcacaggcgtgagccactgtgcctggccaaataattattttttwaaaaaaccatggcttaagttatttatttttaaaaggaagccaaatagtacccctctgttgtttattaaaggaaatatatgacattatagatgtcctgtgagcacatgtgtatatgagtctatataattaagagaaagatagaacatgagcctatgcatgtttatgtgtgtgcgtgtatttatatttatgtatgtgtgtgtttgtgtgtgtgtaatgaaactgtctctaggcaaggccaggtacaaaggtccatcatttaagtctcagagctaaataaacatgtgaggttataattatttt

SEQ ID NO: 968 - DNA, 601 bp, Human
ggtccatcatttaagtctcagagctaaataaacatgtgaggttataattattttattgagcttttttattttatgacccactaatggcttatggatcagttatattgataagcactgaaaacatacagcttcagagtttttttattttttcatttattgtttttattttaaagtgccaagaagaaaatgcccagttcccagccttatttttcatttataataaaccatagaagtacaatttatattatagggtagaaactaaagtgtatgtagggtgtatataactggcaatttgtatgcracaataacgtactttcaatttctgatgaaaattgttgaacttcatttttgaatttaaaattaaatttatttttaaaattttttttattatgaatttggggcgtacacatgcaggtttgttacatggacatactgtgtaatggtgagatttgggcttctagtgtacccatcattcaaatagtgcatattgcacccaaaagaccatttttcaacactcacctccctcctgttctccaatttttttggagtctcctgtgtctattgtttccatctttacatccatgtccattgtttatctccc

SEQ ID NO: 969 - DNA, 601 bp, Human
ccactaatggcttatggatcagttatattgataagcactgaaaacatacagcttcagagtttttttattttttcatttattgtttttattttaaagtgccaagaagaaaatgcccagttcccagccttatttttcatttataataaaccatagaagtacaatttatattatagggtagaaactaaagtgtatgtagggtgtatataactggcaatttgtatgcgacaataacgtactttcaatttctgatgaaaattgttgaacttcatttttgaatttaaaattaaatttatttttaaawttttttttattatgaatttggggcgtacacatgcaggtttgttacatggacatactgtgtaatggtgagatttgggcttctagtgtacccatcattcaaatagtgcatattgcacccaaaagaccatttttcaacactcacctccctcctgttctccaatttttttggagtctcctgtgtctattgtttccatctttacatccatgtccattgtttatctcccacttaaaagttagaacatgtggtatttgattttctgtttctaagttatttcacttggcattccagttccatacatac

SEQ ID NO: 970 - DNA, 601 bp, Human
cttcagagtttttttattttttcatttattgtttttattttaaagtgccaagaagaaaatgcccagttcccagccttatttttcatttataataaaccatagaagtacaatttatattatagggtagaaactaaagtgtatgtagggtgtatataactggcaatttgtatgcgacaataacgtactttcaatttctgatgaaaattgttgaacttcatttttgaatttaaaattaaatttatttttaaaattttttttattatgaatttggggcgtacacatgcaggtttgttacatggayatactgtgtaatggtgagatttgggcttctagtgtacccatcattcaaatagtgcatattgcacccaaaagaccatttttcaacactcacctccctcctgttctccaatttttttggagtctcctgtgtctattgtttccatctttacatccatgtccattgtttatctcccacttaaaagttagaacatgtggtatttgattttctgtttctaagttatttcacttggcattccagttccatacatacagctgcaaaatacatgattttattctttctttattgctgtgtagtattcca

SEQ ID NO: 971 - DNA, 601 bp, Human
ttatagggtagaaactaaagtgtatgtagggtgtatataactggcaatttgtatgcgacaataacgtactttcaatttctgatgaaaattgttgaacttcatttttgaatttaaaattaaatttatttttaaaattttttttattatgaatttggggcgtacacatgcaggtttgttacatggacatactgtgtaatggtgagatttgggcttctagtgtacccatcattcaaatagtgcatattgcacccaaaagaccatttttcaacactcacctccctcctgttctccaatttttttkgagtctcctgtgtctattgtttccatctttacatccatgtccattgtttatctcccacttaaaagttagaacatgtggtatttgattttctgtttctaagttatttcacttggcattccagttccatacatacagctgcaaaatacatgattttattctttctttattgctgtgtagtattccatggcatatatataccacattttctttacccaatcattcattgatgaatacttgggttgattccatgactttgctattgtgaacagtgctgcaataaacataagagtgcaccaccaa

SEQ ID NO: 972 - DNA, 601 bp, Human
ttgacaaaattgttgaaattctgcatttgagtgtatgtcttgaaatcaactattcaatatcaggttaatgtttctttttgcactttttattatggcaaaattaaccccgttatgtcatttagcatttgtgagaagataacgtaatacaaacatagtttttaaaatttgttgttgttttgtttttacatgtactgtagattatgtatgccatattttatcaagagttgagatgctagaaattcctgtctgtgtaatttcctgtgggaactacctgtagctttctgcccaaagaaagaggggyggggcagggctatgcaggccagtttaatctttccaaatttgccagccagataaattcctttacctgctctggggcaggtgaatgaatgcatgcagtgaggtcaggagtcagctccagctgtatagaaggaaacatcaggagtgaggagtgtctcctcccctcccagtgttaacatttctaatattcatgggtagattcaattgaaaactaagtataaacattttgtttaatgtagtgcttgattatctgtcttatctattttcaagtaaaactaaaaactgagtatttagctttaaaatt

SEQ ID NO: 973 - DNA, 601 bp, Human
gtatgtcttgaaatcaactattcaatatcaggttaatgtttctttttgcactttttattatggcaaaattaaccccgttatgtcatttagcatttgtgagaagataacgtaatacaaacatagtttttaaaatttgttgttgttttgtttttacatgtactgtagattatgtatgccatattttatcaagagttgagatgctagaaattcctgtctgtgtaatttcctgtgggaactacctgtagctttctgcccaaagaaagaggggcggggcagggctatgcaggccagtttaatcttyccaaatttgccagccagataaattcctttacctgctctggggcaggtgaatgaatgcatgcagtgaggtcaggagtcagctccagctgtatagaaggaaacatcaggagtgaggagtgtctcctcccctcccagtgttaacatttctaatattcatgggtagattcaattgaaaactaagtataaacattttgtttaatgtagtgcttgattatctgtcttatctattttcaagtaaaactaaaaactgagtatttagctttaaaattatttagcttctctcaaactctcagttttatca

SEQ ID NO: 974 - DNA, 601 bp, Human
ctgtagattatgtatgccatattttatcaagagttgagatgctagaaattcctgtctgtgtaatttcctgtgggaactacctgtagctttctgcccaaagaaagaggggcggggcagggctatgcaggccagtttaatctttccaaatttgccagccagataaattcctttacctgctctggggcaggtgaatgaatgcatgcagtgaggtcaggagtcagctccagctgtatagaaggaaacatcaggagtgaggagtgtctcctcccctcccagtgttaacatttctaatattcatggrtagattcaattgaaaactaagtataaacattttgtttaatgtagtgcttgattatctgtcttatctattttcaagtaaaactaaaaactgagtatttagctttaaaattatttagcttctctcaaactctcagttttatcaacatcttgtcaattttaattgataacaccttcagcagagtttgtaggaatgaaatagaagcatttcccagttttgcttcaagagtctgaaatattttggttttttaagattatattgccattacaaagaaaaccatttgacttgatatatgtatatgtt

SEQ ID NO: 975 - DNA, 601 bp, Human
ctgctctggggcaggtgaatgaatgcatgcagtgaggtcaggagtcagctccagctgtatagaaggaaacatcaggagtgaggagtgtctcctcccctcccagtgttaacatttctaatattcatgggtagattcaattgaaaactaagtataaacattttgtttaatgtagtgcttgattatctgtcttatctattttcaagtaaaactaaaaactgagtatttagctttaaaattatttagcttctctcaaactctcagttttatcaacatcttgtcaattttaattgataacaccttyagcagagtttgtaggaatgaaatagaagcatttcccagttttgcttcaagagtctgaaatattttggttttttaagattatattgccattacaaagaaaaccatttgacttgatatatgtatatgttccccatggtcagagcctaccattaaattttctaaagattcttaggttaatttttttaactgtgtactttcagtgctaaaatatttattagaatcacactatggggaatgagaaatgttagactttatcaatatcgttgtctattggatcctctacatttacagtcaaattctt

SEQ ID NO: 976 - DNA, 601 bp, Human
aatgtagtgcttgattatctgtcttatctattttcaagtaaaactaaaaactgagtatttagctttaaaattatttagcttctctcaaactctcagttttatcaacatcttgtcaattttaattgataacaccttcagcagagtttgtaggaatgaaatagaagcatttcccagttttgcttcaagagtctgaaatattttggttttttaagattatattgccattacaaagaaaaccatttgacttgatatatgtatatgttccccatggtcagagcctaccattaaattttctaaagawtcttaggttaatttttttaactgtgtactttcagtgctaaaatatttattagaatcacactatggggaatgagaaatgttagactttatcaatatcgttgtctattggatcctctacatttacagtcaaattcttcaagtctcatcatatgtacagaaattgaagaacagttaatttctaggtgactaaatttggaaacacatgtaaagagagcagaagggcaatggaaatttacgcaagagagaactacctattttctgaatttgttaatatttaaaataggacccctacccaaactaa

SEQ ID NO: 977 - DNA, 601 bp, Human
tgttagactttatcaatatcgttgtctattggatcctctacatttacagtcaaattcttcaagtctcatcatatgtacagaaattgaagaacagttaatttctaggtgactaaatttggaaacacatgtaaagagagcagaagggcaatggaaatttacgcaagagagaactacctattttctgaatttgttaatatttaaaataggacccctacccaaactaaatgaaactaaaaattcagttcttgtttttctgctagaccttgcatttctttgtattactatttgcaccattaaaaawatatatataaatatatattttaaaaagttctctgccgggcgtggtggctcacacctgtaaacccagcactttgggaggccgaagtgggcagatcacctgaggttgggagtttaagaccagtctgaccgatatggagaaaccccgtctctactaaaaatacaaaattagtcggatgtggtggcacatgcctgtaatcccagctacttggaaggctgaggcaggagaatcgcttgaacccaggagggggaggctgcagtgagccgagatcgtgctattgcactccagcttgggcaacaagag

SEQ ID NO: 978 - DNA, 601 bp, Human
agagagaactacctattttctgaatttgttaatatttaaaataggacccctacccaaactaaatgaaactaaaaattcagttcttgtttttctgctagaccttgcatttctttgtattactatttgcaccattaaaaatatatatataaatatatattttaaaaagttctctgccgggcgtggtggctcacacctgtaaacccagcactttgggaggccgaagtgggcagatcacctgaggttgggagtttaagaccagtctgaccgatatggagaaaccccgtctctactaaaaatacaraattagtcggatgtggtggcacatgcctgtaatcccagctacttggaaggctgaggcaggagaatcgcttgaacccaggagggggaggctgcagtgagccgagatcgtgctattgcactccagcttgggcaacaagagcgaaactccgttcaaaaaaagaaaaaagaaaaaaaattatgatgcattagcttacataaatatacattgaaatttaggccgggtgtggtggctcacgcctgtaatcccaccacgttgggaggccgaggcaggcggatcgcctgagctcaggagatcgagaca

SEQ ID NO: 979 - DNA, 601 bp, Human
aaatatatattttaaaaagttctctgccgggcgtggtggctcacacctgtaaacccagcactttgggaggccgaagtgggcagatcacctgaggttgggagtttaagaccagtctgaccgatatggagaaaccccgtctctactaaaaatacaaaattagtcggatgtggtggcacatgcctgtaatcccagctacttggaaggctgaggcaggagaatcgcttgaacccaggagggggaggctgcagtgagccgagatcgtgctattgcactccagcttgggcaacaagagcgaaactcygttcaaaaaaagaaaaaagaaaaaaaattatgatgcattagcttacataaatatacattgaaatttaggccgggtgtggtggctcacgcctgtaatcccaccacgttgggaggccgaggcaggcggatcgcctgagctcaggagatcgagacaagcctgggcaacatggcggaaccccgtatctacaaaaaattgaaaaaattaaccagggcgtggtggcgggtgcctgtgatcccagctccttggtaggttgaggtgggaggatcgcttgagcccaggaggcccaggctgcagtgagtt

SEQ ID NO: 980 - DNA, 601 bp, Human
aaattatgatgcattagcttacataaatatacattgaaatttaggccgggtgtggtggctcacgcctgtaatcccaccacgttgggaggccgaggcaggcggatcgcctgagctcaggagatcgagacaagcctgggcaacatggcggaaccccgtatctacaaaaaattgaaaaaattaaccagggcgtggtggcgggtgcctgtgatcccagctccttggtaggttgaggtgggaggatcgcttgagcccaggaggcccaggctgcagtgagttgagatcccaccactgcactccagcytgagtgacaaatggaatttaaatagtattagggacaaaaggattaatgaacacggtttaaaggaattctgcatattagaattctggaatacttccgcaggcattctaaagtcctaaaacctgttgttttacggattctaaaattcagttttttgtacagcggattttcaaacaattttttttcttttactgaggacgttgaaattcatagcacaggatcttgagtccaccctgaaaactaaagaaagtggcttgttagactcttcagtcccaaaatataatgtgaaatgagaatgcatgt

SEQ ID NO: 981 - DNA, 601 bp, Human
aagggcttgaaaaatatctagcacagaattggcccttgttatttgttaagcacagtattatttccaagggaactctcccaaatcatccctgaccaaactactacccttattaagagatagattggcctcttagattatatatcccttagctttgctcatcaatagaggcaaaggattcatttatctaaaggaataaaaaacaattgcccttgaagttagtggattcgtgcacctaaaaaatggcctgcatatggtaccaatcaaatcttttatttcttgcatattttgcagataatacgawtttcaaatacaggttgtatggaatcaagtgaatcatctttaggagaagactgatttttagtaacctaaaatttttagtaatcaaatctggcagagcccagatttgaactgaggagactgtctttagagccatacacttattcaggacagtaaatattcagagataaaaccagtgtagaaattaatatcagggctatatcattaacaagattctatcacttcatttgcatttttttttttttttggtgtatgtgtctcttatataaagaaatagcgatgctgtgaatgcctacatatttgt

SEQ ID NO: 982 - DNA, 601 bp, Human
actggataacaagagagaataagaaaaatgttctgcatttgttaaactaccatggaggtgaaggaagattttacaagctgaaaaatatgaaaaaaaaagaacatttctttatcttctgtagtattgataaataacatatttccagaagattatccatcacatcaatgttttcaagtttatttgtatcaatttgaggaaagtagtctatcatgacacttttaattgattaggatataccatattaccaaaaatagcaaaaacatatcacaaaggtttatgatttatataacaggaaaaacawccttaactttttttttttgatgttatagaaaaaagtgttattttttggaaaaattctcccatacaatctgagaacaatataattcttattaaatgtatgcttaatagcctattagataatttgcttatctatgtgctatacctggtaacttttggtttattaatgtaaattttaaaaagttcctcaagaattaataataacacaaaagtttaataagattaactggaaagtacataatatctaaggtaaaattaaatcaaactttgggaaaaatcatttccccttctttgagcagcgcac

SEQ ID NO: 983 - DNA, 601 bp, Human
ctttatcttctgtagtattgataaataacatatttccagaagattatccatcacatcaatgttttcaagtttatttgtatcaatttgaggaaagtagtctatcatgacacttttaattgattaggatataccatattaccaaaaatagcaaaaacatatcacaaaggtttatgatttatataacaggaaaaacaaccttaactttttttttttgatgttatagaaaaaagtgttattttttggaaaaattctcccatacaatctgagaacaatataattcttattaaatgtatgcttaatwgcctattagataatttgcttatctatgtgctatacctggtaacttttggtttattaatgtaaattttaaaaagttcctcaagaattaataataacacaaaagtttaataagattaactggaaagtacataatatctaaggtaaaattaaatcaaactttgggaaaaatcatttccccttctttgagcagcgcacattttaattgtatacgtgcatagccatggcagagcagcacatattgagtgcccaaagtgtcaaagctggcagcccaggctgaatcctgtagcatggctgcactctg

SEQ ID NO: 984 - DNA, 601 bp, Human
acaaccttaactttttttttttgatgttatagaaaaaagtgttattttttggaaaaattctcccatacaatctgagaacaatataattcttattaaatgtatgcttaatagcctattagataatttgcttatctatgtgctatacctggtaacttttggtttattaatgtaaattttaaaaagttcctcaagaattaataataacacaaaagtttaataagattaactggaaagtacataatatctaaggtaaaattaaatcaaactttgggaaaaatcatttccccttctttgagcagcrcacattttaattgtatacgtgcatagccatggcagagcagcacatattgagtgcccaaagtgtcaaagctggcagcccaggctgaatcctgtagcatggctgcactctgataagctactacaggtcttctctctgatacttagtttgaactttaaaaataatttttatcagtgaaaccaagagtgaatgataaagataatagctaaagtaaaacaaaattcaggcggaggtgaagtaagtccaactttattaattttttgtattgaagtatggtactgaaataatattttaccatatttt

SEQ ID NO: 985 - DNA, 601 bp, Human
tggaaagtacataatatctaaggtaaaattaaatcaaactttgggaaaaatcatttccccttctttgagcagcgcacattttaattgtatacgtgcatagccatggcagagcagcacatattgagtgcccaaagtgtcaaagctggcagcccaggctgaatcctgtagcatggctgcactctgataagctactacaggtcttctctctgatacttagtttgaactttaaaaataatttttatcagtgaaaccaagagtgaatgataaagataatagctaaagtaaaacaaaattcaggcgraggtgaagtaagtccaactttattaattttttgtattgaagtatggtactgaaataatattttaccatattttccatgaaccttgccagaaaatatatctgggataattaagtgttatacatattactacaaaggaagtaaggactcttcattttcaatcctaatgaccttgaacaagtaacttcgtttctctggatctcatttctttttctttttcttttttttttttttttttttgagacagaatctcacccaggctggaatgcagtggcgtgatctcggctcactgcaacctctgcc

SEQ ID NO: 986 - DNA, 601 bp, Human
ttgaactttaaaaataatttttatcagtgaaaccaagagtgaatgataaagataatagctaaagtaaaacaaaattcaggcggaggtgaagtaagtccaactttattaattttttgtattgaagtatggtactgaaataatattttaccatattttccatgaaccttgccagaaaatatatctgggataattaagtgttatacatattactacaaaggaagtaaggactcttcattttcaatcctaatgaccttgaacaagtaacttcgtttctctggatctcatttctttttctttttcttttttttttttttttttttgagacagaatctcacccaggctggaatgcagtggcgtgatctcggctcactgcaacctctgcctcctgggttcaagtgattctcttgcctcagcctcccgagtaaccgggactacatgcgtcagccaccacactcggctaatttttgtattttttattttagcggagacggagtttcgccatgttgggcaggctggactcgaactcctggcctcaggtgatccacctgcctcggtatcccaaggtgctaggattacaggcgtgagccactggtcccggccg

SEQ ID NO: 987 - DNA, 601 bp, Human
tttaaaaataatttttatcagtgaaaccaagagtgaatgataaagataatagctaaagtaaaacaaaattcaggcggaggtgaagtaagtccaactttattaattttttgtattgaagtatggtactgaaataatattttaccatattttccatgaaccttgccagaaaatatatctgggataattaagtgttatacatattactacaaaggaagtaaggactcttcattttcaatcctaatgaccttgaacaagtaacttcgtttctctggatctcatttctttttctttttcttttttytttttttttttttgagacagaatctcacccaggctggaatgcagtggcgtgatctcggctcactgcaacctctgcctcctgggttcaagtgattctcttgcctcagcctcccgagtaaccgggactacatgcgtcagccaccacactcggctaatttttgtattttttattttagcggagacggagtttcgccatgttgggcaggctggactcgaactcctggcctcaggtgatccacctgcctcggtatcccaaggtgctaggattacaggcgtgagccactggtcccggccggatctc

SEQ ID NO: 988 - DNA, 601 bp, Human
ataattaagtgttatacatattactacaaaggaagtaaggactcttcattttcaatcctaatgaccttgaacaagtaacttcgtttctctggatctcatttctttttctttttcttttttttttttttttttttgagacagaatctcacccaggctggaatgcagtggcgtgatctcggctcactgcaacctctgcctcctgggttcaagtgattctcttgcctcagcctcccgagtaaccgggactacatgcgtcagccaccacactcggctaatttttgtattttttattttagcggaracggagtttcgccatgttgggcaggctggactcgaactcctggcctcaggtgatccacctgcctcggtatcccaaggtgctaggattacaggcgtgagccactggtcccggccggatctcattttctcaccagaggatggaattagatcactggttttcaaacggtgctctgcagagtcctacagattagaaatgctttttagtctcccacacaattctgactttgtattttatccattagcttcatgcttggaatttatttagataattccataaagtaaaggtttgaaaagcccctgg

SEQ ID NO: 989 - DNA, 601 bp, Human
aggcgtgagccactggtcccggccggatctcattttctcaccagaggatggaattagatcactggttttcaaacggtgctctgcagagtcctacagattagaaatgctttttagtctcccacacaattctgactttgtattttatccattagcttcatgcttggaatttatttagataattccataaagtaaaggtttgaaaagcccctggactatattacatctgaaatttctttacttttaacactttatgagccatttatgtttttcctaattcctatacttgagtcagacacaggarttaccatacaaattttgtgcttttccacttctggaactgccttatactccagacttttcatggaatatccatctgctcttcttactagtagaaattccatttatttttcaaggttcaactctggctatccctgagatgaattgaattatcagccaggaaaaaactttcgttccctggaattttgaaaacagtaagttagtattatttttgagcacttacctgttctttgttctgttagggttgctatgtacttgatgagtttctgtcattcctacaggagctgggcaaatctgataagca

SEQ ID NO: 990 - DNA, 601 bp, Human
gataattccataaagtaaaggtttgaaaagcccctggactatattacatctgaaatttctttacttttaacactttatgagccatttatgtttttcctaattcctatacttgagtcagacacaggagttaccatacaaattttgtgcttttccacttctggaactgccttatactccagacttttcatggaatatccatctgctcttcttactagtagaaattccatttatttttcaaggttcaactctggctatccctgagatgaattgaattatcagccaggaaaaaactttcgttccytggaattttgaaaacagtaagttagtattatttttgagcacttacctgttctttgttctgttagggttgctatgtacttgatgagtttctgtcattcctacaggagctgggcaaatctgataagcacgagtagggcgatgaatagaagataatggtgggaccccaaggcactttctaggatgtacacatttcatcaagagggggtgtcacagccttagtgagatttctgtactgtccacagggaaatttaagatcaacatggccaaattctatttcaataaaaattatgcatctaaattt

SEQ ID NO: 991 - DNA, 601 bp, Human
tatattacatctgaaatttctttacttttaacactttatgagccatttatgtttttcctaattcctatacttgagtcagacacaggagttaccatacaaattttgtgcttttccacttctggaactgccttatactccagacttttcatggaatatccatctgctcttcttactagtagaaattccatttatttttcaaggttcaactctggctatccctgagatgaattgaattatcagccaggaaaaaactttcgttccctggaattttgaaaacagtaagttagtattatttttgagaacttacctgttctttgttctgttagggttgctatgtacttgatgagtttctgtcattcctacaggagctgggcaaatctgataagcacgagtagggcgatgaatagaagataatggtgggaccccaaggcactttctaggatgtacacatttcatcaagagggggtgtcacagccttagtgagatttctgtactgtccacagggaaatttaagatcaacatggccaaattctatttcaataaaaattatgcatctaaattttcaatgaaatttttgacatctgaaaactcatttataaaa

SEQ ID NO: 992 - DNA, 601 bp, Human
gaaaatcaagttgtgaagtggatcatcctcaaatttaaaatcttttggtctcaccctcagaatatcccctacttgaggctttgcagtgtaaatgccttcctgaataaaaatgagattaaggaatatttcacagttccttaagcagcagaaagattagctagttgcctagaaaaaattaaaaatctcatctggaaatttgggaggattttaatgggacctccttgtattgatcttgaaagatatagtttgtattaaaagcctctcttctcctctcccctcccctcccctcccttctgctccrtttttagaaggagtctctctctgttacccaggctggaagtgcagtggcacaatctttgctcactgcaacctccgcctcccaggttcaagcgactctcctgcctcagcctcccgagtagctgggactacaggcttgcaccaccatgctcagctaatttttgtatctttttatagagatggggtttcaccatgttgcccaggctggtcttgaactcctgacctcaggtgacctgcctgccttggcctcccaaagtgctgggattacaggtgtgagccaccgccccccggctggtttttgttt

SEQ ID NO: 993 - DNA, 601 bp, Human
tggggtttcaccatgttgcccaggctggtcttgaactcctgacctcaggtgacctgcctgccttggcctcccaaagtgctgggattacaggtgtgagccaccgccccccggctggtttttgttttgttttgttttggatactttcctgatcgccttttgatgtttgtcactagaacactgacaagtttatattcttttaaataccacttgctggtcgtcatgcttgctttttctttattaagaatatgtttgaattttaacctgtaaacacaaaatttgacacagtcatatcttgattctrtatctaacagcagtagtgtttataacatatttacaccattgtttcattattgttggctgaagtaattcctagttaacttttcattttctggttaaaattgtaatctaattccgtgttctgtttatcactaaataacagagtaatcagtagtgactgaatattaggagggacaattgaacacttttaaactcaatgacatgtgaactgaacatgcgcaggtatcataaaacaaagtttgaaatgatttgtttataacaaaacaatagctctttaatgaggaaatggacaacagcatgttat

SEQ ID NO: 994 - DNA, 601 bp, Human
atgcgcaggtatcataaaacaaagtttgaaatgatttgtttataacaaaacaatagctctttaatgaggaaatggacaacagcatgttatgttttgctaaaataaatataaaatggattatatttctaaaaatgatgaatgttgctatattaaaatatttattcatttatttcaaataagtcacttaattttttttttaaattttatcttaataaattagtcaagggatggttactttctcttttcaatgcaaatgtaattccttaagtggttttcatggcccagggcatgactgcatttytctgcatcttttctctttaacagggctattaacattaagcaagcaaaagtgttctcttgttaaaaaggaacagtccacccattccacccagagaagttccctctggtgctcggcccctccctgcactcaggtctgcagtgaggccatttcttttctcagcttttgttacactgccccctgcatctcaccaagtggactcgcagtctaaattgttaaggtttctcatattttttcctccctaaaacgtaaacataccattggtgcaactcttccttgaagcttaatgtcgtgtatttaatg

SEQ ID NO: 995 - DNA, 601 bp, Human
tgctatacacatggacactttcacataaaatacttcatgaattatcacaactttattattagtagtattacagattcaaaagtaaagttaaggaatattcaagttagggaagccaagtagatggctgcttttcagaacgtaaatttttattgttttaatgaaagaaaatatggcaaaattggcaatatattttccttttgacccaacgtgtcattaagaagaattctaagtaaattagaatgtttagctcagcatttctttaaatagaaattgttagaaatgaatcacatgactaaatagsagaatggctaagtatagtgtggtacatcttcatgatgagcaataaacagtcattacgaatcatgttttcagtaaaatggaaaatggaaaatggaaaaaagctctctggttaataataattgaaaagagtgatatttagaaatgtatagtccttctgattgcaattgtggaaacaacctttgagttctgagccagagtactccagtgcacaaggcttctgcccatctcaagggcctccctggaattctcctggccatcctctttgcctggctacttcttcaggttccagcttaagtgtttc

SEQ ID NO: 996 - DNA, 601 bp, Human
aaattggcaatatattttccttttgacccaacgtgtcattaagaagaattctaagtaaattagaatgtttagctcagcatttctttaaatagaaattgttagaaatgaatcacatgactaaataggagaatggctaagtatagtgtggtacatcttcatgatgagcaataaacagtcattacgaatcatgttttcagtaaaatggaaaatggaaaatggaaaaaagctctctggttaataataattgaaaagagtgatatttagaaatgtatagtccttctgattgcaattgtggaaacatcctttgagttctgagccagagtactccagtgcacaaggcttctgcccatctcaagggcctccctggaattctcctggccatcctctttgcctggctacttcttcaggttccagcttaagtgtttctttctcaggaaagcctttgctgatctgcaggaccacttcagccacattatgttccccagttacatgttctcacaaaactctaattttccttcatggtatatattatgattataattaatcaccttgtggtatctttcaaatgtctgtcctccccaatagactatcagcttcactg

SEQ ID NO: 997 - DNA, 601 bp, Human
aggcttctgcccatctcaagggcctccctggaattctcctggccatcctctttgcctggctacttcttcaggttccagcttaagtgtttctttctcaggaaagcctttgctgatctgcaggaccacttcagccacattatgttccccagttacatgttctcacaaaactctaattttccttcatggtatatattatgattataattaatcaccttgtggtatctttcaaatgtctgtcctccccaatagactatcagcttcactgaagcagtaactgtgtccttgtttactcaatgcctgycccagtgactgggacatagaatgagctcagtaaacatttgttgaggaaatgaacaaatgagtgaattgcaaggcactctctgagcacttttgacataatttcattgagactccaccaaaaacttatgaagtagaaaccatatttattacattttatggataaggaaactaaattgtaaaggaagaaaattggccagagttatacagtaggcggacagctccaatgtaaacctgacgtctctgaatgttgtgcacaagctcttagccgccaattgtaagtggttgtactgaatgtaactaa

SEQ ID NO: 998 - DNA, 601 bp, Human
caaacttcaatatttaagataaacttgcctttcaaaaattaattttgttcctcaaactcaccaaagtaaaacataatttaaaatctatctctatagatttcctcttatactttttattttggtttttcttccagtgattgctgccttgaccgtccctgctcttgaagtaagtacaaatgagcaaggaccctgaaaaactctgggctcagattgccctagtttgttagataattttgatggtacaggggcatgtattttgagatacagcatttggtagtctttggagttaagtcatactgcygacacagattctactggctgttgcagacactagcttccctactaggtctgctctagctgccaaccatatccttcatccaaagcatcagatgtgagccctgaatgattatatagggcccagttttattcaggccttaatgccagacttacagatgaatgaatgactgaatgaattacagtccctgccttaactggattcttaatttctagctcttctttcttgaccatcacatttgacttcttgaccttaaccttacaaatgaaactagctgtccttcctaaggacattgtccctacgatc

SEQ ID NO: 999 - DNA, 601 bp, Human
tggccaaataattttcccttaagttttctgcatgtcttaaagtataagtctccattgtccctcttatagagacctcaacatgctttctggttgaaccttagcagtaccttttgttatattttaataaccagatttgagtaacttgatttggccatctttctttttccttcattgatcatatacatgttgaatctgtgttatgtacaaagtagtaagctaagcccttaggaagaaaataagatacctataaacaatagtccttgcctaagagtatttcacactttagttaaattagtaatarttactatagttcttttgtagaaaccaatttcagttcatctgtacctttgtagatggaagctgaccaaattcaggcaaaaaacaaacaaacaaaaattttctatgctgaaagtttatagttgattttggaatttcactttctaaaagtgaatttaaaaactgagtagccaggcatggtggctcatgcctgtaatcccagcgcttcgggaggttgagccgggaggatctcttgaccccaggagtttgagaccacccgggcaacagagcaagaccccatctctacaaaaaataaaaaattagc

SEQ ID NO: 1000 - DNA, 601 bp, Human
gagtaacttgatttggccatctttctttttccttcattgatcatatacatgttgaatctgtgttatgtacaaagtagtaagctaagcccttaggaagaaaataagatacctataaacaatagtccttgcctaagagtatttcacactttagttaaattagtaataattactatagttcttttgtagaaaccaatttcagttcatctgtacctttgtagatggaagctgaccaaattcaggcaaaaaacaaacaaacaaaaattttctatgctgaaagtttatagttgattttggaatttcrctttctaaaagtgaatttaaaaactgagtagccaggcatggtggctcatgcctgtaatcccagcgcttcgggaggttgagccgggaggatctcttgaccccaggagtttgagaccacccgggcaacagagcaagaccccatctctacaaaaaataaaaaattagctgggtgtggtggcatgtgcctgtggtctcagcaatgtgggaagctgaggcaggaggatcacttgagcctgggagatcgaggcggcagtgagccgccatgatcacaccacttgcactccagcatgtgcgacagagc

SEQ ID NO: 1001 - DNA, 601 bp, Human
gttcttttgtagaaaccaatttcagttcatctgtacctttgtagatggaagctgaccaaattcaggcaaaaaacaaacaaacaaaaattttctatgctgaaagtttatagttgattttggaatttcactttctaaaagtgaatttaaaaactgagtagccaggcatggtggctcatgcctgtaatcccagcgcttcgggaggttgagccgggaggatctcttgaccccaggagtttgagaccacccgggcaacagagcaagaccccatctctacaaaaaataaaaaattagctgggtgtgrtggcatgtgcctgtggtctcagcaatgtgggaagctgaggcaggaggatcacttgagcctgggagatcgaggcggcagtgagccgccatgatcacaccacttgcactccagcatgtgcgacagagcgagaccctgtctaaaaaaaaatgataagaaaaaactaggtaatgttaaatcccacttacttcaacaatttaaaaattggcaaatattaaaaacccagttttttactcatttctgaataatataaatgctttaaaactcattttgacaacctttatattccactataacagtatt

SEQ ID NO: 1002 - DNA, 601 bp, Human
atctgtacctttgtagatggaagctgaccaaattcaggcaaaaaacaaacaaacaaaaattttctatgctgaaagtttatagttgattttggaatttcactttctaaaagtgaatttaaaaactgagtagccaggcatggtggctcatgcctgtaatcccagcgcttcgggaggttgagccgggaggatctcttgaccccaggagtttgagaccacccgggcaacagagcaagaccccatctctacaaaaaataaaaaattagctgggtgtggtggcatgtgcctgtggtctcagcaatgygggaagctgaggcaggaggatcacttgagcctgggagatcgaggcggcagtgagccgccatgatcacaccacttgcactccagcatgtgcgacagagcgagaccctgtctaaaaaaaaatgataagaaaaaactaggtaatgttaaatcccacttacttcaacaatttaaaaattggcaaatattaaaaacccagttttttactcatttctgaataatataaatgctttaaaactcattttgacaacctttatattccactataacagtatttaccttgggacaggctccttttgccaac

SEQ ID NO: 1003 - DNA, 601 bp, Human
aaaaataaaaaattagctgggtgtggtggcatgtgcctgtggtctcagcaatgtgggaagctgaggcaggaggatcacttgagcctgggagatcgaggcggcagtgagccgccatgatcacaccacttgcactccagcatgtgcgacagagcgagaccctgtctaaaaaaaaatgataagaaaaaactaggtaatgttaaatcccacttacttcaacaatttaaaaattggcaaatattaaaaacccagttttttactcatttctgaataatataaatgctttaaaactcattttgacaayctttatattccactataacagtatttaccttgggacaggctccttttgccaacttgcagacaggtttttcttttacatgtaattgtatgtgtagatcagcgattcttatatttttttattttatttatttatttgtttttaagtttaacatgccgttggctctagaagctgccatgtttaagaatttcgggatagacacatatttgatcttttatatttgttatttggtttgtacacgtaatatcactgatctgctcaacaaatctttaatggcttccaatcattcatgtaaacaaatct

SEQ ID NO: 1004 - DNA, 601 bp, Human
ggtaatgttaaatcccacttacttcaacaatttaaaaattggcaaatattaaaaacccagttttttactcatttctgaataatataaatgctttaaaactcattttgacaacctttatattccactataacagtatttaccttgggacaggctccttttgccaacttgcagacaggtttttcttttacatgtaattgtatgtgtagatcagcgattcttatatttttttattttatttatttatttgtttttaagtttaacatgccgttggctctagaagctgccatgtttaagaatttcrggatagacacatatttgatcttttatatttgttatttggtttgtacacgtaatatcactgatctgctcaacaaatctttaatggcttccaatcattcatgtaaacaaatctgaaattttctgtctagctctctccaaaccctccataaaatagtcccactcttactatccaatcacacttctcacatatcctttcaaacactaattatttgcctttctttgacccaaaagtcttcttttcttttgcctaccaatcaaaatttatctatcctttaaagcccagcttagacccagtttcatg

SEQ ID NO: 1005 - DNA, 601 bp, Human
catccctatgattcaattacctcccaccagatccctcccatgacatgtggggattatgaaaactacaattcaaaatgagatttgggtggggacacagacaaaccatatcactccttgagggtaggaaccatgctttatatttttctttatgtctttggactccagaaacaagggccacttattagggagtttagaaatcactgttgttaaatgtaatttgacaaaattggtcattggactttttttgttttgttttgttttactttgtttttgagatggagtctcactgtgttgcccaggktggagtgcggtggcgtgttcttggctcactgcaacctttgcctcccaggatcaagcaattcttctgcctcagcctcctgagttgccgggactacaggcgtgtgccaccatgcctggctattttttttttgtatttttagtagagacagggtttcatcatgttggccaggttggtcttgaacttctgacctcaagtgatctgcccacctcagcttcccaaagtgctgggattacaggcatgagccactatgcccggcctcattggacgttttggacaataagcttagaacaatacaatctt

SEQ ID NO: 1006 - DNA, 601 bp, Human
ttgagggtaggaaccatgctttatatttttctttatgtctttggactccagaaacaagggccacttattagggagtttagaaatcactgttgttaaatgtaatttgacaaaattggtcattggactttttttgttttgttttgttttactttgtttttgagatggagtctcactgtgttgcccagggtggagtgcggtggcgtgttcttggctcactgcaacctttgcctcccaggatcaagcaattcttctgcctcagcctcctgagttgccgggactacaggcgtgtgccaccatgccwggctattttttttttgtatttttagtagagacagggtttcatcatgttggccaggttggtcttgaacttctgacctcaagtgatctgcccacctcagcttcccaaagtgctgggattacaggcatgagccactatgcccggcctcattggacgttttggacaataagcttagaacaatacaatctttcttaggactttaaagcattagagactttagggattaatatagcaaattcttcattttacagatgagagaactgcgatttacacagggacagtatggatcagccattcttagta

SEQ ID NO: 1007 - DNA, 601 bp, Human
tataagacacttcaaaaaattgtacatggggtcatacacacaggtgcaaactaaaggggagtttagattgctcattgctcttccaaggtgaaatcaccattttatctgatgacttacaaatgaaaaatctggccaataaatctatttagtcagatttctcaacattgtgaatgatcctcctggtagccagatattatgtctatcatgacatgaccgcttatttcatgttgacttgttgttctgtgtggaacttcctgtggcactagagttttcttaagtataaaccattccaaaatcacaytgttattatgggttgctttgtcctcaggctctgtaggactccttttgggctattggtctttcaacatgcagttaggggataaaagtaaatcatttaatctatgcagcatgtcactcaatagtatacttttggaaattgtttccacaggagcaccagcgaaagcagccagtctgagatattgacactacagaaaaaactgacagcttactccttgtattgattctactcttctctacaaatatagactccgttccctaccacagccttgtaagtggtgcccgctgaggctgctaaattgct

SEQ ID NO: 1008 - DNA, 601 bp, Human
aatagtatacttttggaaattgtttccacaggagcaccagcgaaagcagccagtctgagatattgacactacagaaaaaactgacagcttactccttgtattgattctactcttctctacaaatatagactccgttccctaccacagccttgtaagtggtgcccgctgaggctgctaaattgctttgtaaattatttattacttggacaccttgtaaagacctcttttcttcttgtctgacttgcttgtgctttcgtatatactaaaaggtctcaaagtgtacactgaccacaacctcctyatgaaatcctttccttcctatcttttattgcaaatatgatcttccttgcccatattatgactatgccttttgtcattggtttttatttctgatctattgcttataaaatatcataaatgtttatatgcacgtttggagcctggcactgggcacttaattagcatattctcaaattagaaagtttgaagtatttaaagaacatttatttaatgatgggaaagagtttctattaataaaaactgtttatcagagcaaatgcacatctttatttgcacttatgtggtagagtcaatgttctga

SEQ ID NO: 1009 - DNA, 601 bp, Human
tttccacaggagcaccagcgaaagcagccagtctgagatattgacactacagaaaaaactgacagcttactccttgtattgattctactcttctctacaaatatagactccgttccctaccacagccttgtaagtggtgcccgctgaggctgctaaattgctttgtaaattatttattacttggacaccttgtaaagacctcttttcttcttgtctgacttgcttgtgctttcgtatatactaaaaggtctcaaagtgtacactgaccacaacctccttatgaaatcctttccttcctatmttttattgcaaatatgatcttccttgcccatattatgactatgccttttgtcattggtttttatttctgatctattgcttataaaatatcataaatgtttatatgcacgtttggagcctggcactgggcacttaattagcatattctcaaattagaaagtttgaagtatttaaagaacatttatttaatgatgggaaagagtttctattaataaaaactgtttatcagagcaaatgcacatctttatttgcacttatgtggtagagtcaatgttctgaaaaagatggcaagtgttttctc

SEQ ID NO: 1010 - DNA, 601 bp, Human
ttaggtcatagaaatttgagaagcacaaaaacacacttctaaaatcactataattctttttcttttctttcctttttttttttaagacaggatctggctctgttgcccaggctggagtgtagtggtgcgatctccgctcactgcaacctctgcctcctggggattcaagcaattctcgtgcctcagcctcccaagtagcgggattacaggcacatgccaccacagccagctaatttttgtatttttagtaaagaaggagtttcttcatgttggccaggctggtctcaaatacctgacctcrggtgatccatccgtcttggcctcccaaagtgctaagattacaggcgtgagccaccgcgtcaggccagatcactgtaattctcattgaaatgggaaatgcaagtcgcttagaggactaaggattagaccatgaagacttataagcagaagagtccagctatgtctagacaggccactgtggttaagagatgggcacacaaagaacaatgcttgccccaaacaagtggttttagacagtgaggcccttagccataagcttgaaatctgtttcaataatatcctctccaggccaggtttactc

SEQ ID NO: 1011 - DNA, 601 bp, Human
ttgacacaaaaaacaagtggaagtctgcacatgactttgtgcaagaaatgcatgagggaacagagttggaatatgactgaaatatatatatatatatatacactcacacacataaatatgtatgtagtcatatacatatgaatcataaaatgcttaaatatgtgtaaaaatatgtattgaaaacatgtagatctaccttattttatatatatttagtaaaatttgggaagaagggaaaatctcatcattggagtggaccaaatttgtgttaaacaattttagaaaagacagcaaggtatayatctggagggaaaggaactattagactgaactgtactgagtagattgagtttcatgtcctgggaagaaatggaggctggttggacacatgcttccccatcctgaagagtgcttagaaaaaggcgtgctttctttctcacagaatgaatcattgaggcaaaagctataaaggtatatacagcaaaatagctttgccaaatgtttataccatggatatttccaacaaaagtgtaagagattgtccatttgactgcattcttatcaatacttggtattgtaattgaaaaataataaaatgcta

SEQ ID NO: 1012 - DNA, 601 bp, Human
tgattatgttttaattgttattctttttcaaaaaaaatgtttaaaaatttgtcccaagcaattgggggtacattttctttaattttctctgttgttacattttccactgaaagcaaatttgcagacatatacatcaatgccaaataatagaatctaccctccatatattaatatttttccaatgtgatatctctgagcagcattgtattgctatttcaaatagtaatagtatatattaggaaagctgaatgattataaacttacagttcattcacaaaatttactaagttcatactttgtygaaacaattgtagagaaatcaaagttgtctaaaacatcaaaccttcctgcaaagagaagacagttaatgagattataaacatgtattcaatacattcacaagcagcatgaaataaatgacaataaaattagacaaagtgttatttttacacagagtaaggaaaaaagctactgctctcccatacagcacacacacacacacacacacacacacacacacacacacacacacacaggttgacaatacacaaggagaccaagaaaaaatcatgtgatagatacgtgaaaatttaagtcattt

SEQ ID NO: 1013 - DNA, 601 bp, Human
cctagattactgccttgaacataataagtggtcattatttttttttgaatgaatgaatggtggcaaaatgtagtatttgaaaggattaacttttagataatactagtaatagcatatgtagaaataaacatgcactaaaattatacattttatacaattataattatacaattatagaaaaatatatttatttaacaataaacatctctactttaaaaaggtaacaaaaacagtgtttatttaaattgactttgaattatgacctgctatctataagcaaggtgatgtttttggtgttaargaaactatatagtttcatagtttggtctccatcaattagtaagtgtaagtgatgccagtagtacactggtatatcttatcaaataacaaaacactgaagacagaataagatgaatatgataggagagaaaaaatggcagagattttggaacacaatgacttttgcttattctatttatgcttttgcaactgattcacagactatgttcctaaaacttaaactagtatcctcctactcttctcattgtgtcatctttgaaatcaccaacaatggtatttcgtatcatgcagagtcatatag

SEQ ID NO: 1014 - DNA, 601 bp, Human
aataacaaaacactgaagacagaataagatgaatatgataggagagaaaaaatggcagagattttggaacacaatgacttttgcttattctatttatgcttttgcaactgattcacagactatgttcctaaaacttaaactagtatcctcctactcttctcattgtgtcatctttgaaatcaccaacaatggtatttcgtatcatgcagagtcatatagaaaactttaatacaggtgtaatatctctgaagtttccatgtttaatatccccatgtgatggcattcactattatcacatttwctatagatgttaaggatgggaagttattattatattaaagaagactttggattactaacttgtaatgtttctgtaggcctcagaattcactgtgctgaggagctaacaggatcctgacatttaattgtctctgcctgagcattctgtcaactttggaacttgtatgaggcaagtgtgataacatacataaagacagaacacttctaattttttttttttttttttttaaatacagagtctcctctgtcacccaggctggagcgcagtggtgcgatcttggttcactgcagcctcaacctc

SEQ ID NO: 1015 - DNA, 601 bp, Human
ttttgcttattctatttatgcttttgcaactgattcacagactatgttcctaaaacttaaactagtatcctcctactcttctcattgtgtcatctttgaaatcaccaacaatggtatttcgtatcatgcagagtcatatagaaaactttaatacaggtgtaatatctctgaagtttccatgtttaatatccccatgtgatggcattcactattatcacattttctatagatgttaaggatgggaagttattattatattaaagaagactttggattactaacttgtaatgtttctgtaggmctcagaattcactgtgctgaggagctaacaggatcctgacatttaattgtctctgcctgagcattctgtcaactttggaacttgtatgaggcaagtgtgataacatacataaagacagaacacttctaattttttttttttttttttttaaatacagagtctcctctgtcacccaggctggagcgcagtggtgcgatcttggttcactgcagcctcaacctcccgagttcatgcaattcttgtgcctcagcatcccaagtagatgagcccacaggcccgtcccaccaggcctggctaatt

SEQ ID NO: 1016 - DNA, 601 bp, Human
aatatccccatgtgatggcattcactattatcacattttctatagatgttaaggatgggaagttattattatattaaagaagactttggattactaacttgtaatgtttctgtaggcctcagaattcactgtgctgaggagctaacaggatcctgacatttaattgtctctgcctgagcattctgtcaactttggaacttgtatgaggcaagtgtgataacatacataaagacagaacacttctaattttttttttttttttttttaaatacagagtctcctctgtcacccaggctggagygcagtggtgcgatcttggttcactgcagcctcaacctcccgagttcatgcaattcttgtgcctcagcatcccaagtagatgagcccacaggcccgtcccaccaggcctggctaatttttgtagttttagtagagacgaaatttcaccatgttggccagtctggtctcgaactcctggcctcaagtgatctgcccgccttggcacttttaattttgtataataaaatatttgatacaaacatacacactacatatgcagtataaagaataatactgaaataggtacaatatagcccttacc

SEQ ID NO: 1017 - DNA, 601 bp, Human
actcctagttattttaaacagccaccagaattctccatctcacaactttcagaggggatttactccaaaatcttggatttcttaatcttgcatctcttcttaccacttaatttattaaaaaaagaatctctctacaaagctcaagaacataactggttgtcatgaaggagctcctataatatttggtttttattccatgaaaattaataagactataaccagacaagtggagaaaaagacatagaaaacatagaagcatatatagaaattataacgaagcagcatcaaatacattattacaatatatatatatatatggcattaaaatatgtaaagataggttgtgctatgtctctgatgactgtctaaagttttgtgactatgagaaatgcagtttttggaaaaatgaagagcagcagtgtctactagatttagaaacattatcttaacaacaaaatgcaaattttgttgcagaaaagatatttcctcagttccaatgccctatgattcagaaaaacctagttgagtaggggctacagccctttgcttgtttctcactagctttgatggggtatataaatgctgtgtagatgagaagggc

SEQ ID NO: 1018 - DNA, 601 bp, Human
aactttcagaggggatttactccaaaatcttggatttcttaatcttgcatctcttcttaccacttaatttattaaaaaaagaatctctctacaaagctcaagaacataactggttgtcatgaaggagctcctataatatttggtttttattccatgaaaattaataagactataaccagacaagtggagaaaaagacatagaaaacatagaagcatatatagaaattataacgaagcagcatcaaatacattattactatatatatatatatatggcattaaaatatgtaaagataggttktgctatgtctctgatgactgtctaaagttttgtgactatgagaaatgcagtttttggaaaaatgaagagcagcagtgtctactagatttagaaacattatcttaacaacaaaatgcaaattttgttgcagaaaagatatttcctcagttccaatgccctatgattcagaaaaacctagttgagtaggggctacagccctttgcttgtttctcactagctttgatggggtatataaatgctgtgtagatgagaagggcttgaggactaagaaccaaacagggttgtgtattatctctgttt

SEQ ID NO: 1019 - DNA, 601 bp, Human
aaaacatagaagcatatatagaaattataacgaagcagcatcaaatacattattactatatatatatatatatggcattaaaatatgtaaagataggttgtgctatgtctctgatgactgtctaaagttttgtgactatgagaaatgcagtttttggaaaaatgaagagcagcagtgtctactagatttagaaacattatcttaacaacaaaatgcaaattttgttgcagaaaagatatttcctcagttccaatgccctatgattcagaaaaacctagttgagtaggggctacagcccttkgcttgtttctcactagctttgatggggtatataaatgctgtgtagatgagaagggcttgaggactaagaaccaaacagggttgtgtattatctctgttttaaaacaaagtctgttttctctattggcagaaaaggtgggtgtttgtgttcgtgtttgtgtttttgggtcattaaaatacatttaattttgtcaggcagaggacaccacatctgattccttgtaaaaggaagtcataactgctggacacatagagaccaggagagggctaggtactgcagagaaattaaaagaggtataaa

SEQ ID NO: 1020 - DNA, 601 bp, Human
ttataacgaagcagcatcaaatacattattactatatatatatatatatggcattaaaatatgtaaagataggttgtgctatgtctctgatgactgtctaaagttttgtgactatgagaaatgcagtttttggaaaaatgaagagcagcagtgtctactagatttagaaacattatcttaacaacaaaatgcaaattttgttgcagaaaagatatttcctcagttccaatgccctatgattcagaaaaacctagttgagtaggggctacagccctttgcttgtttctcactagctttgatggggtatataaatgctgtgtagatgagaagggcttgaggactaagaaccaaacagggttgtgtattatctctgttttaaaacaaagtctgttttctctattggcagaaaaggtgggtgtttgtgttcgtgtttgtgtttttgggtcattaaaatacatttaattttgtcaggcagaggacaccacatctgattccttgtaaaaggaagtcataactgctggacacatagagaccaggagagggctaggtactgcagagaaattaaaagaggtataaagtacaatatataatacacctaata

SEQ ID NO: 1021 - DNA, 601 bp, Human
gttgagtaggggctacagccctttgcttgtttctcactagctttgatggggtatataaatgctgtgtagatgagaagggcttgaggactaagaaccaaacagggttgtgtattatctctgttttaaaacaaagtctgttttctctattggcagaaaaggtgggtgtttgtgttcgtgtttgtgtttttgggtcattaaaatacatttaattttgtcaggcagaggacaccacatctgattccttgtaaaaggaagtcataactgctggacacatagagaccaggagagggctaggtactgyagagaaattaaaagaggtataaagtacaatatataatacacctaataatgtattgaagaaaaggtaaaatggttttggctaggcacggtggctcacgcctgtaatcccaacactttgggaggccgaggcgggcagatcacgaggtcaggagttcgaggtcagtgtggccaacatggtgaaaccccgtctctactaaaaatacaaaaattagcagggtgtggtggcaggcgcctgtaatcccagctactcgggaggctgaggcaggagaattgcttgaacccaggaggcggaggttgcagt

SEQ ID NO: 1022 - DNA, 601 bp, Human
acaaatttgataacttagatgaaatggacaaatttctaggaagacacaaagtatcaaatctgactcaagtaaaaatagcaactctgaataggcttataatatgtaagataattaaattagtgatcaaaaacattcccgcaaaaaaagtccaggattatatgacttcactggtgaattcgagcaagtatttaaagacaaattgtcacaaatcctttgaaaacacttccaaaaattgaaaagaaggaaacacaacttattatatgaggccaatattaccctgataacaaaaccagatgaagayatcaaaagaaaaaaaattgacagaccagcaatcttatgaatataagtgcaaaaaatcctcaacaaaatactgtactagcaagccaaatacaacaacagaaaaaaaggattatctatcataatcaagtgggctttatctcacaaatgaaagggtggttcaacattaaaaaatcaatgcacactaaaagaataaagaacaaaaaccacatgatcatctcagtagaaacagaaaaagcattttacaaaatacaacacacttttaagaaacaacacttaaaaagccagaaatacaagtgaactt

SEQ ID NO: 1023 - DNA, 601 bp, Human
tgtttttgctacttctatttagcattttactggaagttcaaaccagggcaactaagcaagaaaaagaaagaaaaggtgtccagattggaaatgaagaagtaaaactatgtcaatttgcagatgacatgatgttttatatagaaagccccaagaaatccctcagtagctattcaaactactaaatgggttcaacagggttataggatagatacaaggttaatatacaaaaattagtttaatttctatacattagcaaacaacagtcagaaggtgaaataagaaaataatttcattaacaatwgcttaaaaataataaagtactaagaaacacatttaacaaaagagatacaagactgtacactaaaaactacaagcattattgagagaaatggaagaattccttaataattggaaagacatcccatgttcatggattgaaagatttaatatatatgtaagatggcaatactccacaaattgatttacatatttaacatagtcctaacaaaattccagttgtcttttttttgcagaccttgacaagctgataataaagttcagatgaaaattcaagagacctaaaatatgcaaaaaagaaaat

SEQ ID NO: 1024 - DNA, 601 bp, Human
actttccaatttcaaaacttactagaaaggtacagtaattaaagctgtacagtactaacataagaatagatatatagattaatgaaatagaatttagagtccagtggggggaaaaactcatatattcatgataaattgattttgacaagggcaccaagacaattcaagtgagaaacaatagtctcttcaaaaaatggagataggacaactggaaatttacatgccaaaaaataatgttgaatgcctacgtgacataacatacaaaaattaactaaaagtgatcaatgacacaaatgcaacwgctaaaactatcaaatccttaaaagaaaacatattcatgagcttgtattaggcaatggactattagatatcacactaaaagcacaaactacaaaagaaaaaataaattagacttcaccaaaattaaccattgtgcttcaaaagacattatcaagaaagtgaagagacaattcatcgaatgggagataatgtttacaaatcatatgtcagataagggtcttgtatccagaatatataaagaactcttacactgcagcaacaatacaatgaaaactcaatcaaaaatgggcaaaggatttga

SEQ ID NO: 1025 - DNA, 601 bp, Human
gacaattcatcgaatgggagataatgtttacaaatcatatgtcagataagggtcttgtatccagaatatataaagaactcttacactgcagcaacaatacaatgaaaactcaatcaaaaatgggcaaaggatttgaatagatgttactttaaagacgatatataaacgaacaataagcacatgaaaaaatgtccaacatcgttagtcattaggaaaatgcaatttaaaacaatgagacaatgctttacatcccccacaatggctataatgaaaaaggcagaaagtaacgagtgttggtgargatgtggagaaattgaaatctcatgtattactggttggaatgtaaaatggccaactgctctgggaaaatgtttagcagtttttcataaagacaaacatagagttaccatatgatctagcaatttctctctagaacatgtacccaagagcatttaaaatacatgttcatatgaaaaaatatgtaacaatgtctatagcattgttcataaaaactgaatagtggaaataatttgtatttccatcagctaacatatggataagaaaatgggttatattcatataatagaatatcattcagcca

SEQ ID NO: 1026 - DNA, 601 bp, Human
atcattcagccataaaaaaatgaagtgttgatacctattacaacatggattagccttgaaaacattacactaagtgaaacaagacacacatgcacacaaaatattgtacaattcccttcagatgaaatgtccagaatgagaaaatttaatagagaaagaatattgattagtatttttcagaggcaaggggagggaggtcgggcatgactgttaatgtatattggttttttgaggactgatgaaaatgttttgaaattagagactggtaatgtttgtccaaccttttgaatacacttaaagstactaaattataaataaatataataaacatgtatctatatataaaatgtgtttatagtttatcatatataattatattagaatttatcctgggaaattgtaataaaaaagactaacaagggaagaataatgaatactaccagattttaaaacatattataaaactacaggaattttaaaagtttacagctggccaaggtggctcataccagtaatcccagcacattgggaggccaatgtggggggatcacttgagtccaggggtttgagaccagcctgggcaagatagggagatcgtatc

SEQ ID NO: 1027 - DNA, 601 bp, Human
gaaaatgttttgaaattagagactggtaatgtttgtccaaccttttgaatacacttaaagctactaaattataaataaatataataaacatgtatctatatataaaatgtgtttatagtttatcatatataattatattagaatttatcctgggaaattgtaataaaaaagactaacaagggaagaataatgaatactaccagattttaaaacatattataaaactacaggaattttaaaagtttacagctggccaaggtggctcataccagtaatcccagcacattgggaggccaatgtsgggggatcacttgagtccaggggtttgagaccagcctgggcaagatagggagatcgtatctctacaaaaaataaaaataaaaaaaataatccaggcatggtatgcacacctgtagtcccacctacttgggaggctgaggccagaggctcagcccaggagtctaaggctgcagtgagctatgattatgccactgcactccagcccagctgacatagtgagatcctgtctcagataacaaaatgtttggtaacatttggtacataatagacagatcgataagttgaaacagaatccaaatgt

SEQ ID NO: 1028 - DNA, 601 bp, Human
cggctcactgcaacctccgcctcccgggttcaagcgattctcctgccttagactcccgagtagctggtactacaggcgtgcaccaccacgcccagctaatttttgtatttttagtagagacgaggtttcaccctgttagccaggatggtcttcatctcctgaccttgtgatccacctgcctcggcctcccaaagtgttgggattacaggcgtgagccaccgcgcctggccctgaagtctatgttcttggtgatttgcaagtattattaactatggtcagcatttatacaatagatttctcraatttaaaaacaaagttttaaacataaaataaagtatatataaaagttgtgtgaaagacagagaattgagagaacatgttttccctaatcctcatgaggataccctgtataaacacagtaaaacatagagataacaaataataaaatttgacttgatgaattttataaacctgcattacaaaaatagcagtttatagcatattttaggtaaatgttaattttaatatgtaaagagattttatcaagtgacaagaaaatagcaaacagcctaatgggcaaaggacaaaaacacgtaggtca

SEQ ID NO: 1029 - DNA, 601 bp, Human
ggcctcccaaagtgttgggattacaggcgtgagccaccgcgcctggccctgaagtctatgttcttggtgatttgcaagtattattaactatggtcagcatttatacaatagatttctcaaatttaaaaacaaagttttaaacataaaataaagtatatataaaagttgtgtgaaagacagagaattgagagaacatgttttccctaatcctcatgaggataccctgtataaacacagtaaaacatagagataacaaataataaaatttgacttgatgaattttataaacctgcattacaaraatagcagtttatagcatattttaggtaaatgttaattttaatatgtaaagagattttatcaagtgacaagaaaatagcaaacagcctaatgggcaaaggacaaaaacacgtaggtcaaaagaaaaagtaagcttttaaacatatactaaaacgcgtcatcctgtacaaataattaaagaagcacaagggtaagcaacaatgtaatactactcttaccattcagtttttaaacatgtcttttaatatttggtatagaagaggttgtggaaaaacaggcattctattatgatatattgttg

SEQ ID NO: 1030 - DNA, 601 bp, Human
atataaaagttgtgtgaaagacagagaattgagagaacatgttttccctaatcctcatgaggataccctgtataaacacagtaaaacatagagataacaaataataaaatttgacttgatgaattttataaacctgcattacaaaaatagcagtttatagcatattttaggtaaatgttaattttaatatgtaaagagattttatcaagtgacaagaaaatagcaaacagcctaatgggcaaaggacaaaaacacgtaggtcaaaagaaaaagtaagcttttaaacatatactaaaacgcstcatcctgtacaaataattaaagaagcacaagggtaagcaacaatgtaatactactcttaccattcagtttttaaacatgtcttttaatatttggtatagaagaggttgtggaaaaacaggcattctattatgatatattgttggagtgtgtgtaattattataattgctttgaagtaatttgacctaaaaaatttgacctatacctttcgctcagaaattcttcctttagaaagacacccattgttagcaattacatttgtaggctattcatgatattgtctgtaatagcaaaagtctg

SEQ ID NO: 1031 - DNA, 601 bp, Human
gttaattttaatatgtaaagagattttatcaagtgacaagaaaatagcaaacagcctaatgggcaaaggacaaaaacacgtaggtcaaaagaaaaagtaagcttttaaacatatactaaaacgcgtcatcctgtacaaataattaaagaagcacaagggtaagcaacaatgtaatactactcttaccattcagtttttaaacatgtcttttaatatttggtatagaagaggttgtggaaaaacaggcattctattatgatatattgttggagtgtgtgtaattattataattgctttgaaktaatttgacctaaaaaatttgacctatacctttcgctcagaaattcttcctttagaaagacacccattgttagcaattacatttgtaggctattcatgatattgtctgtaatagcaaaagtctgaaattgtctgttagtaggggagtagtccaatatacgatgatatggatatattttcaaacaaaatatgcaaaacaaaatgcatattgtaacatatttgtactttgaaagtacacaaacacttatactcatgcagtttttacttgcatacactttttctggacagatacatagtatct

SEQ ID NO: 1032 - DNA, 601 bp, Human
taactctgggtatgccagtgagaatgtgtcatgtatgagaaaatcacatggtcacaagctgtaatcttttgctgtggatgggaaccagtttaaagctagtaaagaggaagttccaggtaatctaaaggcctaggagtcattgtgggttatgtttagaatacatgagtctaagttgtctccataatcctaaaagctaataaaattctgggtgtattgggaggccgaggcaggtggatcatttgaggtcaggagttccagaccagcctggccaacatggtgaaaccctgtctctactaaaaayacaaaaattagccaggtgtggtggcatacatctgtggtcccagctactcaggaggctgaggcaggagaatcccttggaccaggaggcacaggttgcagtgagctgagattgtgccactgcactccaggctaggtgacagagtaagactttgtccaaagcacacagacacacacacacacacacacacacacacacacaaacacaccaaaaacaacaacaaaaaaaatctggatatgatcagggaagaaaacaaaacatatttttaccttttatattaacaagtgtttctccctttaaaat

SEQ ID NO: 1033 - DNA, 601 bp, Human
aaattctgggtgtattgggaggccgaggcaggtggatcatttgaggtcaggagttccagaccagcctggccaacatggtgaaaccctgtctctactaaaaacacaaaaattagccaggtgtggtggcatacatctgtggtcccagctactcaggaggctgaggcaggagaatcccttggaccaggaggcacaggttgcagtgagctgagattgtgccactgcactccaggctaggtgacagagtaagactttgtccaaagcacacagacacacacacacacacacacacacacacacacacacacaccaaaaacaacaacaaaaaaaatctggatatgatcagggaagaaaacaaaacatatttttaccttttatattaacaagtgtttctccctttaaaatatcaaagatagttctggttactaaatctcaagaaagacatgctcttaaaactgggattactaggtcaaaagttacaagcattttaataactcttgatatatacatatatattatacacttacaaacatatatacaacatatactttttgggggagggcaatttacattgctgttagtgttgcacgagtgatattaatta

SEQ ID NO: 1034 - DNA, 601 bp, Human
aattctgggtgtattgggaggccgaggcaggtggatcatttgaggtcaggagttccagaccagcctggccaacatggtgaaaccctgtctctactaaaaacacaaaaattagccaggtgtggtggcatacatctgtggtcccagctactcaggaggctgaggcaggagaatcccttggaccaggaggcacaggttgcagtgagctgagattgtgccactgcactccaggctaggtgacagagtaagactttgtccaaagcacacagacacacacacacacacacacacacacacacacaaccacaccaaaaacaacaacaaaaaaaatctggatatgatcagggaagaaaacaaaacatatttttaccttttatattaacaagtgtttctccctttaaaatatcaaagatagttctggttactaaatctcaagaaagacatgctcttaaaactgggattactaggtcaaaagttacaagcattttaataactcttgatatatacatatatattatacacttacaaacatatatacaacatatactttttgggggagggcaatttacattgctgttagtgttgcacgagtgatattaattat

SEQ ID NO: 1035 - DNA, 601 bp, Human
ccaggaggcacaggttgcagtgagctgagattgtgccactgcactccaggctaggtgacagagtaagactttgtccaaagcacacagacacacacacacacacacacacacacacacacaaacacaccaaaaacaacaacaaaaaaaatctggatatgatcagggaagaaaacaaaacatatttttaccttttatattaacaagtgtttctccctttaaaatatcaaagatagttctggttactaaatctcaagaaagacatgctcttaaaactgggattactaggtcaaaagttacaagyattttaataactcttgatatatacatatatattatacacttacaaacatatatacaacatatactttttgggggagggcaatttacattgctgttagtgttgcacgagtgatattaattatctgcaacacataatgtcatttacaaaaagctcattttctaggcataatatattttgaggttaatgcactgtaattattatcaaatttggacattttccaatgttagttttctatttatatttccctttgtctaaattgcaaatttatattgtactgatgatgatttgtttattaaggtc

SEQ ID NO: 1036 - DNA, 601 bp, Human
ccaggctaggtgacagagtaagactttgtccaaagcacacagacacacacacacacacacacacacacacacacaaacacaccaaaaacaacaacaaaaaaaatctggatatgatcagggaagaaaacaaaacatatttttaccttttatattaacaagtgtttctccctttaaaatatcaaagatagttctggttactaaatctcaagaaagacatgctcttaaaactgggattactaggtcaaaagttacaagcattttaataactcttgatatatacatatatattatacacttacamacatatatacaacatatactttttgggggagggcaatttacattgctgttagtgttgcacgagtgatattaattatctgcaacacataatgtcatttacaaaaagctcattttctaggcataatatattttgaggttaatgcactgtaattattatcaaatttggacattttccaatgttagttttctatttatatttccctttgtctaaattgcaaatttatattgtactgatgatgatttgtttattaaggtctttctattagatctttttattaggataatttcattacaaattaaa

SEQ ID NO: 1037 - DNA, 601 bp, Human
gtgacagagtaagactttgtccaaagcacacagacacacacacacacacacacacacacacacacaaacacaccaaaaacaacaacaaaaaaaatctggatatgatcagggaagaaaacaaaacatatttttaccttttatattaacaagtgtttctccctttaaaatatcaaagatagttctggttactaaatctcaagaaagacatgctcttaaaactgggattactaggtcaaaagttacaagcattttaataactcttgatatatacatatatattatacacttacaaacatatatacaacatatactttttgggggagggcaatttacattgctgttagtgttgcacgagtgatattaattatctgcaacacataatgtcatttacaaaaagctcattttctaggcataatatattttgaggttaatgcactgtaattattatcaaatttggacattttccaatgttagttttctatttatatttccctttgtctaaattgcaaatttatattgtactgatgatgatttgtttattaaggtctttctattagatctttttattaggataatttcattacaaattaaaatgatctct

SEQ ID NO: 1038 - DNA, 601 bp, Human
cacacacacacacacacacacaaacacaccaaaaacaacaacaaaaaaaatctggatatgatcagggaagaaaacaaaacatatttttaccttttatattaacaagtgtttctccctttaaaatatcaaagatagttctggttactaaatctcaagaaagacatgctcttaaaactgggattactaggtcaaaagttacaagcattttaataactcttgatatatacatatatattatacacttacaaacatatatacaacatatactttttgggggagggcaatttacattgctgttagygttgcacgagtgatattaattatctgcaacacataatgtcatttacaaaaagctcattttctaggcataatatattttgaggttaatgcactgtaattattatcaaatttggacattttccaatgttagttttctatttatatttccctttgtctaaattgcaaatttatattgtactgatgatgatttgtttattaaggtctttctattagatctttttattaggataatttcattacaaattaaaatgatctcttattacttatttgtaagtaaccctgggattttatacagtgaatt

SEQ ID NO: 1039 - DNA, 601 bp, Human
acaaaacatatttttaccttttatattaacaagtgtttctccctttaaaatatcaaagatagttctggttactaaatctcaagaaagacatgctcttaaaactgggattactaggtcaaaagttacaagcattttaataactcttgatatatacatatatattatacacttacaaacatatatacaacatatactttttgggggagggcaatttacattgctgttagtgttgcacgagtgatattaattatctgcaacacataatgtcatttacaaaaagctcattttctaggcataatayattttgaggttaatgcactgtaattattatcaaatttggacattttccaatgttagttttctatttatatttccctttgtctaaattgcaaatttatattgtactgatgatgatttgtttattaaggtctttctattagatctttttattaggataatttcattacaaattaaaatgatctcttattacttatttgtaagtaaccctgggattttatacagtgaattgtgaattgtggaaactactgtgaatatctaatctgtttcactttataatgttgtacttttgaattatacctat

SEQ ID NO: 1040 - DNA, 601 bp, Human
ttgcaaatttatattgtactgatgatgatttgtttattaaggtctttctattagatctttttattaggataatttcattacaaattaaaatgatctcttattacttatttgtaagtaaccctgggattttatacagtgaattgtgaattgtggaaactactgtgaatatctaatctgtttcactttataatgttgtacttttgaattatacctattatatttgatgggacaagagaggaaagatgagtgaatatttcttaattccactcattaatataggtgattatagaaacttctaccrgaatctgggatatgctcaatttttaacactcatgagtatcactgagaaattttcttttcagagggttttatggataatttactagggtttcgagggaaggtctctgtttctccatgccaaccttttctgaaaatgttagttttcagtacaagtactgattttacccactaaatgttggtagttactgatttctaaactcaactcttctgctaacttgttggtggaactttgacaagtcacttaacttctttgtctcctcaaccacaaaatgaaatgttagtctgagatgtccttaagctc

SEQ ID NO: 1041 - DNA, 601 bp, Human
ccactcattaatataggtgattatagaaacttctaccagaatctgggatatgctcaatttttaacactcatgagtatcactgagaaattttcttttcagagggttttatggataatttactagggtttcgagggaaggtctctgtttctccatgccaaccttttctgaaaatgttagttttcagtacaagtactgattttacccactaaatgttggtagttactgatttctaaactcaactcttctgctaacttgttggtggaactttgacaagtcacttaacttctttgtctcctcaacyacaaaatgaaatgttagtctgagatgtccttaagctccttgctagctgtgcttctttcctgattcatttgtactatccatttcttgcctctagatacacctttggaatatgcaaatgaatttggaattgtctgtattctaacctgagttggcttctctttctacatcattctttaacccttattccagcacaagacaaacagtacaaaggtctcaaaagtttgggaccttagatccagaatgttttgaaacaatattcactcactaaaatatgaacaaagttaaagcaaaatatttaaca

SEQ ID NO: 1042 - DNA, 601 bp, Human
tgttagttttcagtacaagtactgattttacccactaaatgttggtagttactgatttctaaactcaactcttctgctaacttgttggtggaactttgacaagtcacttaacttctttgtctcctcaaccacaaaatgaaatgttagtctgagatgtccttaagctccttgctagctgtgcttctttcctgattcatttgtactatccatttcttgcctctagatacacctttggaatatgcaaatgaatttggaattgtctgtattctaacctgagttggcttctctttctacatcattytttaacccttattccagcacaagacaaacagtacaaaggtctcaaaagtttgggaccttagatccagaatgttttgaaacaatattcactcactaaaatatgaacaaagttaaagcaaaatatttaacaacattgttttacctctcaatttttttgagtttcactgccttgtcgtttacaaacaaatataaacgtaccttatgatagagttattctgtaaactccgtaatgcaagatttccaaaaaaaaaaaacataatacaagagttgcaaatatacatattcgggaattcttgacact

SEQ ID NO: 1043 - DNA, 601 bp, Human
ttgtactatccatttcttgcctctagatacacctttggaatatgcaaatgaatttggaattgtctgtattctaacctgagttggcttctctttctacatcattctttaacccttattccagcacaagacaaacagtacaaaggtctcaaaagtttgggaccttagatccagaatgttttgaaacaatattcactcactaaaatatgaacaaagttaaagcaaaatatttaacaacattgttttacctctcaatttttttgagtttcactgccttgtcgtttacaaacaaatataaacgtamcttatgatagagttattctgtaaactccgtaatgcaagatttccaaaaaaaaaaaacataatacaagagttgcaaatatacatattcgggaattcttgacacttttgtcatctagtttaaaaatcatctgagaaagaatgtaatgaattcatttaactgtgagttacattttaaatattttgtagagacacaaactctgaataattaactctgttactactcaataatttaagtggaatgacccttgacagtctgtttgtaataactaacagtgcattttaattattttttttaaattag

SEQ ID NO: 1044 - DNA, 601 bp, Human
gtaaactccgtaatgcaagatttccaaaaaaaaaaaacataatacaagagttgcaaatatacatattcgggaattcttgacacttttgtcatctagtttaaaaatcatctgagaaagaatgtaatgaattcatttaactgtgagttacattttaaatattttgtagagacacaaactctgaataattaactctgttactactcaataatttaagtggaatgacccttgacagtctgtttgtaataactaacagtgcattttaattattttttttaaattagaaatgacatctctagagttyaagattcttgggagcaaaattgaacttttaaaattggttagtatagagggttatttttcttaatgaaaataaaactgatttgcattttaaaaatctgggtacactttttaaaatgattatgtcagtaatttaacattaggcatatattagagagaattataccttttctttctatctcttcataccaatcttctggtatgttagaaactaggtagtataaaagctaaataattgtaagcctgaaaaatcgaagatttagtgattttaagaatctgaaatttctgtcaaaaaatgtaaagc

SEQ ID NO: 1045 - DNA, 601 bp, Human
agaaaataattaacaaaccacctcattctcatatccctgaattcttacaaggagacatatattttgattactacaatgtaattccctttgacctcctttctaattcaaagcttattagatttcaggattgaactggctcactaacatttaattacagttcttaaatattttctgaatgtgttctaatgtcctggattttcctaaattccacttttcttctcccttagagtagcaaaagttaactggtaaggattattttccgcttccagacaattttgtgatagagtgcaaagacaaattmttgtgggctaggtaaagtgcttttgtggcagatcatcaacaacaacaacaacaacaacaacaacatcagcaaaagctttttatgcagtggctgaaagacgagataggtctttatgtgttaatgtagaatgatatttatgttttgatggttgagcattgcaattttatttgggcctaaaaatgttataggtttacgaaaagaacatatataatagatgatagatagatagacagatataaattccacatgtgcatttgtatgtttttatgtgagtgtgtttgtaaaatacacattttgtgt

SEQ ID NO: 1046 - DNA, 601 bp, Human
ctaattcaaagcttattagatttcaggattgaactggctcactaacatttaattacagttcttaaatattttctgaatgtgttctaatgtcctggattttcctaaattccacttttcttctcccttagagtagcaaaagttaactggtaaggattattttccgcttccagacaattttgtgatagagtgcaaagacaaattcttgtgggctaggtaaagtgcttttgtggcagatcatcaacaacaacaacaacaacaacaacaacatcagcaaaagctttttatgcagtggctgaaagaygagataggtctttatgtgttaatgtagaatgatatttatgttttgatggttgagcattgcaattttatttgggcctaaaaatgttataggtttacgaaaagaacatatataatagatgatagatagatagacagatataaattccacatgtgcatttgtatgtttttatgtgagtgtgtttgtaaaatacacattttgtgtaaacatatagattatatgtaagaactataaatggacaggtaattgtctatttttatatgtaatctatctacttaatttctattttattacaatctctat

SEQ ID NO: 1047 - DNA, 601 bp, Human
gtggcagatcatcaacaacaacaacaacaacaacaacaacatcagcaaaagctttttatgcagtggctgaaagacgagataggtctttatgtgttaatgtagaatgatatttatgttttgatggttgagcattgcaattttatttgggcctaaaaatgttataggtttacgaaaagaacatatataatagatgatagatagatagacagatataaattccacatgtgcatttgtatgtttttatgtgagtgtgtttgtaaaatacacattttgtgtaaacatatagattatatgtaagaaytataaatggacaggtaattgtctatttttatatgtaatctatctacttaatttctattttattacaatctctatctctatatagcgatttgccattgaagaggaaactactgacttttaaaattcttttttttttttttttgagatggagtctcgctctctcgcccaggctggagtgcagcggcgtgatcttggctcactgcaacctccacctcatgggttcaagcaaattcttctgccacagcctcccgagtagctgggattacaggtgcccgccaccatgcccagccaatttttgtat

SEQ ID NO: 1048 - DNA, 601 bp, Human
ggtttacgaaaagaacatatataatagatgatagatagatagacagatataaattccacatgtgcatttgtatgtttttatgtgagtgtgtttgtaaaatacacattttgtgtaaacatatagattatatgtaagaactataaatggacaggtaattgtctatttttatatgtaatctatctacttaatttctattttattacaatctctatctctatatagcgatttgccattgaagaggaaactactgacttttaaaattcttttttttttttttttgagatggagtctcgctctctcrcccaggctggagtgcagcggcgtgatcttggctcactgcaacctccacctcatgggttcaagcaaattcttctgccacagcctcccgagtagctgggattacaggtgcccgccaccatgcccagccaatttttgtatttttaatagagatgggatttcaccatcatggccaggctggtctcgaactcttgacctcgtgatccacctgccttggcctcccagtgggctgggattacaggcgtgagccactgtgcccggctgacttttaaaattctaattgacataaattttaaagtttact

SEQ ID NO: 1049 - DNA, 601 bp, Human
aattctaagcagagatgtgcaaagtttaagacaattttaaacttattaagtgacttaaaacataaaagaaataaacggaattctcaggtttctgtgtaagaaaactaaaatatgtggagaatttaagagtttttaaattaattttagtttgaacaaagcttgtgaaaaggattccaaagttaattttcatataatgaacagaataaaataataattttgaaaaaaaaaagataaaagcgagaagaaaagggagaataaccgtatcaatggctaaacaacattataagaatacaatgatgtygttggaacaggaatagacaaacagaatattttaacaaatagactaaatgacccttttctgtatacagaaaaatccatccttccagcacaggcagggagattgggccgggagctcctttcctctactctctggctccaagaagaacttttccatgccctatttgagaaaatgggctgggcacaagccttgaacaatttgctaatcttataatatccaaataaaatatgtttctgtgaggattgacatgtggttacaaaagcatttacttaaaaaaaaaaaaaaaggaagttagatctccat

SEQ ID NO: 1050 - DNA, 601 bp, Human
actaaatgacccttttctgtatacagaaaaatccatccttccagcacaggcagggagattgggccgggagctcctttcctctactctctggctccaagaagaacttttccatgccctatttgagaaaatgggctgggcacaagccttgaacaatttgctaatcttataatatccaaataaaatatgtttctgtgaggattgacatgtggttacaaaagcatttacttaaaaaaaaaaaaaaaggaagttagatctccatcttacaccatggtcccaaataaattctaaatatattaaacarttaaataaaatattgggccttaataactgtatgaaaaatttattaaatctcttaaaaaagaactttctaggtttaaaattattcatttattcaaaagctattgaaacctcgttttttcagctagtaggtatacagctttaagacaaaagaactacttttcaaagagcttagaatctagctgaaagcacaactcaagtattgacaataacaattgatctttacattaggggaagaacagattgtagtaaggggaaagacaggagccgtaaccacgtaggcaaacacagaggcaagagaaaa

SEQ ID NO: 1051 - DNA, 601 bp, Human
cagtgatattgattatcctaaccctgtgtaggcctagactaaggtgtgtgtatttgtcttaatattttaacaaaagtttaaaaagtaaaaaaaaataaaaattagaaatagaaaatgtttatagaatatggatatcaagaaaaatatttttgtacagttgacaatgtgtatatgttttaagctgttataagagtcaaaaagttaaaaaacttaaagatgtagaaagttaaaatgttatagtaagttaaggttaatttatttttgaaaaacattttaaaataaattcagtgtagcctacatraagtctgcaatagtgtatcgtaatgcattctaagacttcacattcactcaccacacactcactgacttacccagagcaacttccactgttgccaagttcccttcatggtaggtgcccttgacaagagtaccaatgtttcatttttttaaactatatttttactgcactttttctatatttagatacacaaaaggttaccattgtgttataattgcctattgtattcagtatagtaatacactatacagacttgtagcctaacagcaatagactatagcatatagcctaggtgtgtagtag

SEQ ID NO: 1052 - DNA, 601 bp, Human
aatatggatatcaagaaaaatatttttgtacagttgacaatgtgtatatgttttaagctgttataagagtcaaaaagttaaaaaacttaaagatgtagaaagttaaaatgttatagtaagttaaggttaatttatttttgaaaaacattttaaaataaattcagtgtagcctacataaagtctgcaatagtgtatcgtaatgcattctaagacttcacattcactcaccacacactcactgacttacccagagcaacttccactgttgccaagttcccttcatggtaggtgcccttgacargagtaccaatgtttcatttttttaaactatatttttactgcactttttctatatttagatacacaaaaggttaccattgtgttataattgcctattgtattcagtatagtaatacactatacagacttgtagcctaacagcaatagactatagcatatagcctaggtgtgtagtaggttataccatctaggtttgtgtaattacactgtatgatgtttgcgcaacaatgaaattgcctaacaatgcatttctcagaatatatccccatagttaacatatctcctgtgtgtgtatatatat

SEQ ID NO: 1053 - DNA, 601 bp, Human
gttgacaatgtgtatatgttttaagctgttataagagtcaaaaagttaaaaaacttaaagatgtagaaagttaaaatgttatagtaagttaaggttaatttatttttgaaaaacattttaaaataaattcagtgtagcctacataaagtctgcaatagtgtatcgtaatgcattctaagacttcacattcactcaccacacactcactgacttacccagagcaacttccactgttgccaagttcccttcatggtaggtgcccttgacaagagtaccaatgtttcatttttttaaactatayttttactgcactttttctatatttagatacacaaaaggttaccattgtgttataattgcctattgtattcagtatagtaatacactatacagacttgtagcctaacagcaatagactatagcatatagcctaggtgtgtagtaggttataccatctaggtttgtgtaattacactgtatgatgtttgcgcaacaatgaaattgcctaacaatgcatttctcagaatatatccccatagttaacatatctcctgtgtgtgtatatatatatgtatttatatattttatgtggttggattct

SEQ ID NO: 1054 - DNA, 601 bp, Human
gtcaaaaagttaaaaaacttaaagatgtagaaagttaaaatgttatagtaagttaaggttaatttatttttgaaaaacattttaaaataaattcagtgtagcctacataaagtctgcaatagtgtatcgtaatgcattctaagacttcacattcactcaccacacactcactgacttacccagagcaacttccactgttgccaagttcccttcatggtaggtgcccttgacaagagtaccaatgtttcatttttttaaactatatttttactgcactttttctatatttagatacacaaawggttaccattgtgttataattgcctattgtattcagtatagtaatacactatacagacttgtagcctaacagcaatagactatagcatatagcctaggtgtgtagtaggttataccatctaggtttgtgtaattacactgtatgatgtttgcgcaacaatgaaattgcctaacaatgcatttctcagaatatatccccatagttaacatatctcctgtgtgtgtatatatatatgtatttatatattttatgtggttggattctatgtaattaaaaataatcccaaaattaaaatttaac

SEQ ID NO: 1055 - DNA, 601 bp, Human
gttaccattgtgttataattgcctattgtattcagtatagtaatacactatacagacttgtagcctaacagcaatagactatagcatatagcctaggtgtgtagtaggttataccatctaggtttgtgtaattacactgtatgatgtttgcgcaacaatgaaattgcctaacaatgcatttctcagaatatatccccatagttaacatatctcctgtgtgtgtatatatatatgtatttatatattttatgtggttggattctatgtaattaaaaataatcccaaaattaaaatttaacayggtatttcttcatattcctcagtcattttaaattgctgcctaatgttcatccagttagcactttatctttttattttggtatcttgatgcacaaaagttttctttttaatttaatgtaaggagatgtgtcaatatattctttatggtttgtgctttttgcatcttttagtattattcatttttctgttctgagacaataaatatatttgacattataattattattatattctaaaagccttgctttttacatgtaagtcattaatctacatatgattgtatttgggatttcattttatg

SEQ ID NO: 1056 - DNA, 601 bp, Human
tggtgcaaggaagtattttatttctttcaaatctcattattttttattagtttattggccagtgcagaggaatacaatagataattattttttagtctatatctaggaaattcgtggaatgattttgttaatattatattgtaaattattttgagttttctatttggacaattaaattgattgaaaataataatacctttcttcttttcaaatctttatgtttttaaatttatttgttcttaaaatttctctcttgttagggcctctggtaaaatatttaagaaaagcaatgctagcagcmattttatgtctttcatgatactaaagtcatgattctaattgcctttaatgaataattattaatgattggtttaagttatattaaagaagttcacttttatttgcagtttgctaagtttttatagtggatggatattgaatattaccaaatgactctcttacttcattttagataaacatctttattattattattactattacattattattattattattattgttattatttgagatggagtctcactctgtcgcccaggctggagtgcagtggtgcaatctcagctcactgcaagct

SEQ ID NO: 1057 - DNA, 601 bp, Human
ctaacattccttgtctttgcaaataataaatttgaccttgttaagactctacttaatctttgcatttttatttcaataattgacacatttttactattttatatctattgtgttatttttccctgttgcttgttttctgactttttaaattgtacttgagactaaatttttctccaactatagttgttttatgcaaaagatttttttcttactttgctttttaatttctaattcaattcatattatttatatttttcttaatttttgaaagcaagtggactttttattatattttttattyctgattttattatattttatttagagaatgtgatctatataatgctttctttcatttttaggttaagactttctctatagtcagttttttaaatgttcatgaatcattgacaaaaaaacattttctaattgtcagatgaaggcttctgtatatgtgcattctattagtttgctattttttcctcctttatcagttgcaaaaagatatgtatcgaaggtttgaattaatattgattttccacttttctaattttgcccattcttcctttatatatttctagtctatattaatagctaaata

SEQ ID NO: 1058 - DNA, 601 bp, Human
attgattttccacttttctaattttgcccattcttcctttatatatttctagtctatattaatagctaaataagctaaatataagctgagtagttttactttccattgtagtattttaccattacatagtgattcttttacatgtataatgattttttttggtcttcaaatttcttttttgtctaatattgacataaatctctcttctgtttgtgtgctgggtttattttttccatctttttgctttcttttctttttctttttcttttttttcctttctttcttctttcttttttttttctttcttttttttttttgttgttgttgtctaggttagagtgtaatggtgcaatcttggctcactgcaacctccacctcccgggttcaagcaaatctcctgcctcagcctcccaagtagctgagactacaggtgtgtgccaccacacctggctaatttttgtatttttagtagagatggggtttcaccatgttggccaggctggtctcgaactcctgaccttgggatttgtctgctttggcctctcaaagtgctgagattacaggtgtgagccactgcacccggcccatctttttactttca

SEQ ID NO: 1059 - DNA, 601 bp, Human
tgtgctgggtttattttttccatctttttgctttcttttctttttctttttcttttttttcctttctttcttctttcttttttttttctttcttttttttttttgttgttgttgtctaggttagagtgtaatggtgcaatcttggctcactgcaacctccacctcccgggttcaagcaaatctcctgcctcagcctcccaagtagctgagactacaggtgtgtgccaccacacctggctaatttttgtatttttagtagagatggggtttcaccatgttggccaggctggtctcgaactcmtgaccttgggatttgtctgctttggcctctcaaagtgctgagattacaggtgtgagccactgcacccggcccatctttttactttcaaattttgtacaataggttttcattttttaaataaataaagcagggttttgttactgctgtttacattgttttagaaaatttataaatttgttttcaagtgacatttataatgattgcttatatgtgtcattttattttgtgatttctttattctttttcaaaattattttctgccttcatattgattaaccttctctttcaacctccctccat

SEQ ID NO: 1060 - DNA, 601 bp, Human
ggattacctcctgtttaacttaaatattatatttgtcaaccagtactctagttattttagttcatgctcaacaatgtctatgtattgctttgtttactagtctttccagtgttccattgctagttaagcacccagaattcagagctgtaacacctgattgatattctcaactgtacaatttataagctgtttgtctttgtgcatattttttgtattttttaaaattactttgtttattttaggtttcatttgctctccttcctgtagtttcttcagtttttcagtaatctgagattttagkttattgatttgagagttttcttcttttctaatctaagcactttgaattaggcacgattctccagagaaacaaccaataggacacacacacagagacacacagacacatacatatatattcattatagaaattggctcacatgattgttaaggctgagaagtcccacaacatgctattcacatccacaaactgaagactcaggaaaactagtgtgatttagtccagtctaaaggcctgagaactgtgaaggggagggagagaagcaggaggacagtggtgtaaggtctgtttggagtcaaa

SEQ ID NO: 1061 - DNA, 601 bp, Human
gagatgagtgctgaagaattcaactgttattgtgaatttgcatacttcagatttatgaatttttgcttcatatattttgtagctcttttgttaagtccatatatatttaagattgttatgtcttcttgaagaattgacccctttatcattatataaggtcactattattactcctgacaatattcctttttgttaagtcttttttgtctgaaattgatatagctactccaacttcattttacttaatgattatatgattgtatcatgctgctaataaagacatacccaagactgggtaacktataaagaaaaggggtttaatggaatcacagttccacatggccagggagacctcacaatcatgagagaaggcaaaggagaagcaaaggcacatcttacgtggtgtcaggcaagagagcatgtgtaagggaactaactcccctttataagaccatcagatatcatgagacttattcactatcacgagaatagcatgggaaagacccaccccatgtatcaattacctcccatcgggtacctcccattacatatgggaattatgggagctatattttaagatgaaattttggtggagacacag

SEQ ID NO: 1062 - DNA, 601 bp, Human
ccatatatatttaagattgttatgtcttcttgaagaattgacccctttatcattatataaggtcactattattactcctgacaatattcctttttgttaagtcttttttgtctgaaattgatatagctactccaacttcattttacttaatgattatatgattgtatcatgctgctaataaagacatacccaagactgggtaacgtataaagaaaaggggtttaatggaatcacagttccacatggccagggagacctcacaatcatgagagaaggcaaaggagaagcaaaggcacatctyacgtggtgtcaggcaagagagcatgtgtaagggaactaactcccctttataagaccatcagatatcatgagacttattcactatcacgagaatagcatgggaaagacccaccccatgtatcaattacctcccatcgggtacctcccattacatatgggaattatgggagctatattttaagatgaaattttggtggagacacagccaaactatatcattctgccctggcctctcccaaatctcatatccttacatttcacaaccaatcatgcctttcaaacagtcccccaaagtcttatc

SEQ ID NO: 1063 - DNA, 601 bp, Human
caatcatgagagaaggcaaaggagaagcaaaggcacatcttacgtggtgtcaggcaagagagcatgtgtaagggaactaactcccctttataagaccatcagatatcatgagacttattcactatcacgagaatagcatgggaaagacccaccccatgtatcaattacctcccatcgggtacctcccattacatatgggaattatgggagctatattttaagatgaaattttggtggagacacagccaaactatatcattctgccctggcctctcccaaatctcatatccttacatttcamaaccaatcatgcctttcaaacagtcccccaaagtcttatctcatttcagcattaactcaaaagtccacagtccaaagtctcatcagagacaaggcaagtcccttccacttatgagcctgtaaaatcaaaaacaaattagttacttccaacatacgatgggggtacaggcattgggtaaatacacctgttccaaatgggaaaaattggccaaaataaaggggctacaggccctattcaagttcaaaattcaatggggcagtcaaatcttaaagctccaaagtgatcccctttgactacatg

SEQ ID NO: 1064 - DNA, 601 bp, Human
agactgggtaatttataaaagaaaagaggtttaatgggctcacagttccacgtggctgaggaggcctcacattcatggagaatggcaaatgaggagcaaagtcatgtcttacttattcactatcatgagaacagcatgggaaagaccaacccctatgattcaattgcctcccactgggtccctgtcatgacacatgggaattatgggagctacaatttaatatgagatttgggtagggacacagccaaaccatataaatgatacaactttttttcttgtttaaacttttaatctgtttacrtctttgtatttaaagtgtggttttgtaggcagtatataattgtgcatgtgagcgtgtgtgtgtgtgtgtgtgtgtgtttattcaatctcatagtctctgtatttcagctggtgtatttaaaccattgacatttaaactgatgattaacatgttggattgaagttgaccattttgctagttgttttttatttgttccatttgttttctgtttcttttttttctctcttccagccttctctgtgttaaattgaatgtctttcatgatttcattttacttcttttgtttacttatttttttac

SEQ ID NO: 1065 - DNA, 601 bp, Human
aattcttaattaaagtattatctcaagtggatatattttatacatggatatttttaatggaaaataacaaaagaactattgttaaaacctactcaagtctaaaacaacatgtatttggagattaatcagatcaggtttaaaactgttaaaaagtaacaaatattccttaagttttcccagatagaatgagaagaagacaaataaattcaagtcatcgagcccaagctaaaattccctggttaaaagaagaccagtgaaatatatttttagaggaagactgaagaaagatattttacagtgmgacacaagcaaattatttgcttgatagcagctgcacagttttatgtagatagtatgtataaaaatctattgataatattttaatacaaattttacttgcttttcatgtgataagtaggtgaatgatttctttttccaacagtcatttaataatggtggtcattgctttaatttagtgaggattcttactactctttttaggatttggatgtgtgtggatgttctaatagtcctgaattctggttctagcagtttcagccagttgaagctatgatccgagataaatgtgtactgttactac

SEQ ID NO: 1066 - DNA, 601 bp, Human
gccttacaatggccctatttaggatttttgggtttattatgatggtgcaaaagcagtacacattcaatacattcagacttaagatggggttactttgaaaacacacttttatacttacgatgttttcaacttatgatgagtttattgggacacgtttcctttgcaagtcaaggaacatttgtactttgttattagaattagctttggaggctataaagctttttcaatgaatgacaaaagctgtattcattagacttctgtgtagaagattctgcccaggaatcacaattgttatgctagyatattagttccttaattaaacaaactttttttatatgcctattactgtctgactgtggagatagtgggattatgatgatctgtaagagccagtgtttatatagcttggaatataccagagtatacttacatgaatattaatgttatgaaagtaataacatgatggattaaatagttctttataattctcaaaaggctcaatcatacattcatgtccatcattacagttttcaaacactgaaacacattatcacaatcccatttgaagtatgttaaatattttgcccaagagcccatgagt

SEQ ID NO: 1067 - DNA, 601 bp, Human
ggccctatttaggatttttgggtttattatgatggtgcaaaagcagtacacattcaatacattcagacttaagatggggttactttgaaaacacacttttatacttacgatgttttcaacttatgatgagtttattgggacacgtttcctttgcaagtcaaggaacatttgtactttgttattagaattagctttggaggctataaagctttttcaatgaatgacaaaagctgtattcattagacttctgtgtagaagattctgcccaggaatcacaattgttatgctagtatattagttycttaattaaacaaactttttttatatgcctattactgtctgactgtggagatagtgggattatgatgatctgtaagagccagtgtttatatagcttggaatataccagagtatacttacatgaatattaatgttatgaaagtaataacatgatggattaaatagttctttataattctcaaaaggctcaatcatacattcatgtccatcattacagttttcaaacactgaaacacattatcacaatcccatttgaagtatgttaaatattttgcccaagagcccatgagtggtaaatgca

SEQ ID NO: 1068 - DNA, 601 bp, Human
gtaagagccagtgtttatatagcttggaatataccagagtatacttacatgaatattaatgttatgaaagtaataacatgatggattaaatagttctttataattctcaaaaggctcaatcatacattcatgtccatcattacagttttcaaacactgaaacacattatcacaatcccatttgaagtatgttaaatattttgcccaagagcccatgagtggtaaatgcagacatagatctactatattgtaggtcaaattttctcaacctgagcattattaacatttgacttagatcattytttgttgtggacagctcctccatcattttacgatgtttgcagcattcttggcctgtagtcactacatgcagtagcatctttctccctcagttatcacagccaaaaatgtctctagatactgtcaaatgttcctggggagcaggcaaaatcatctgccattggaaaccactgatgtagccgcctgatgatttctctaatatgttacctaaattttggtagagcgatatttcatataagttaatatgaagctggagttatagcatgtctatataatggaaatgctttcactggagtttattt

SEQ ID NO: 1069 - DNA, 601 bp, Human
atagtattatattttataatactaaatagagtattaaatcacaaaaagaaaaccatgtcattgcagtaacacactgattataactgatgagaaacaaataattttatatacttctatatttttatagaagtattggtaattgtcttatctttatcaaataatattcttagtgtaataatataagaagtataatgaaaatatttactagaagacaccttatatggggtaccttttaattttaattaaaaattaatctgctgtgagattatatctcaaggaagtatgagtatacttatatacttatatagatacagaaaagtgcacagattatccacctatagcttgataacgtttacaactatacacgcctatgtatccacagattaggatttaagcacagagacatgaggatttttaaaagacctatagtggacacacattttacatggtttgacttcttattaatgcagttattaaataaaaatgaatgatgtaaatattatacatagtattttatcaggtaccataagatatatgaataactacgcaaagttataatgtaaagaatttctttgaatttgggaggcatataaatggaaac

SEQ ID NO: 1070 - DNA, 601 bp, Human
atgatctggccgcttcggcctcccaaagttctggaattacaggcgtgagccaccgcaaccggcctccattggtttttctaataatatgtcagctttaatgagcaattattaccctgtgaaaaccacctctgggacctgaaaagacatggattgtgctacctgacacctcacctctaagccagctagctccacaggttcacttgtgattttttattaacctcatagtgatgagattgaatattttggtccacacgtacattgttgtggcagagttttaccgtatgtgacacaaaacgcactmtaagaaaaaaagggttattcaaccaattaagatataagattatattttgaaatggagcagtctctgtaagaaaaagttgaactcatatttctaaatagtaatggtcattttaaatgcctgagattccaaaggaaaattatagcagcaaactaaagaatgaaccttagagaatgtttgtatttatgaggtggatgaggaaacaaacaaacaaaaaagggagttgtcacaaatgtaaaggatgaatcagaagcatataattttaaataaaaatatttactgcatttggtaagttggagggag

SEQ ID NO: 1071 - DNA, 601 bp, Human
atgtttagtgccctgtttgcctcatttttgtgcttattgttggtgtttaaaatggtcctcaagcatattgttgaactactatctagggttcattggagcaaaacggctatgatgtgccttatagagaaaatatgtgacttatagagaaaatatgtgttagataagctttcagatatgagttatggtattgttggatgtgagtttaatgttaatcaacaatatatattaaatcagtgtctttaaatagaaacacacacaaaaggaaggttatatgttgattggttcatgaaaatgtgtgagyaaaggctcgcaggagcatagccctatttctcctaggagcagtggttcagtattcgctaattcaatgttcacaatgactttgtaaaaaaatgattaccatggataatgagaatcggtatacaaacatatatatacacagacatacacacatcctttttgtgtttaagaagttaaagtagaaaattgtagtataccagtattagttacagtctccaagaatacaactataaaaacatatttaagccattagtaaatttcattatattacaatcagaattcaaataattttgtttaatatttg

SEQ ID NO: 1072 - DNA, 601 bp, Human
tgtttaaaatggtcctcaagcatattgttgaactactatctagggttcattggagcaaaacggctatgatgtgccttatagagaaaatatgtgacttatagagaaaatatgtgttagataagctttcagatatgagttatggtattgttggatgtgagtttaatgttaatcaacaatatatattaaatcagtgtctttaaatagaaacacacacaaaaggaaggttatatgttgattggttcatgaaaatgtgtgagcaaaggctcgcaggagcatagccctatttctcctaggagcagtsgttcagtattcgctaattcaatgttcacaatgactttgtaaaaaaatgattaccatggataatgagaatcggtatacaaacatatatatacacagacatacacacatcctttttgtgtttaagaagttaaagtagaaaattgtagtataccagtattagttacagtctccaagaatacaactataaaaacatatttaagccattagtaaatttcattatattacaatcagaattcaaataattttgtttaatatttgcttctgaaactggtgcaccatttagctgttttgataccataaa

SEQ ID NO: 1073 - DNA, 601 bp, Human
atgattaccatggataatgagaatcggtatacaaacatatatatacacagacatacacacatcctttttgtgtttaagaagttaaagtagaaaattgtagtataccagtattagttacagtctccaagaatacaactataaaaacatatttaagccattagtaaatttcattatattacaatcagaattcaaataattttgtttaatatttgcttctgaaactggtgcaccatttagctgttttgataccataaacaagtaaattttataaatgtagatatatgagatctttcagttattktgattgactcatttataaaatgtatctttgagtgagtctatattaggatttctccttttctgtgtaaattaagtaaaattcgatactttctctgctaactttatttaaacaatgcttcttgagctctctgttatttgataggaatttagtagttcagagaaatcaattgactcttctacttcaattttttgtctttctgaaatcttgaataaaggctttaaacctgatggcaatacctttatctctaaccctgttcatgtgagagtgcataattgtgcattttgcaatttccttgtctca

SEQ ID NO: 1074 - DNA, 601 bp, Human
atatgagtggttagttacattcaggccttgctgtttgcagccttaaacttcatgtaaaacctcaatgaaacatattttctctacttttaagataaaggatttgaacaattgatctaattctctcacagcattactgtgattatcagaggaataaaaggcatttttagtactctatcttttcttctgtaaaatacttcactttctctgtgtttgaaaaatgaggtccctcatagaacaaggtcagtattatgggagaatgagtcatttaattctaagctgtaacatgttacaataatttgtyttaaaatggttcaatgcagatgtcatagaatgagttcagatgggtctgcagaggcaaattcataggaaactttgttacctctctgtttggatttatgaaactggttctctagtttcattgtatagtaatgcccaaaaagtgaaaagcctaaacttctacttttttcatgtttttcttatgtattagtctgttctcacgctgctataaagatactacctgagactgggtaattctgaataaaagaggtttaattgacacagttccgcgtggctggggaggcctcaggaaacttacaatcat

SEQ ID NO: 1075 - DNA, 601 bp, Human
aacaaggtcagtattatgggagaatgagtcatttaattctaagctgtaacatgttacaataatttgtcttaaaatggttcaatgcagatgtcatagaatgagttcagatgggtctgcagaggcaaattcataggaaactttgttacctctctgtttggatttatgaaactggttctctagtttcattgtatagtaatgcccaaaaagtgaaaagcctaaacttctacttttttcatgtttttcttatgtattagtctgttctcacgctgctataaagatactacctgagactgggtaattmtgaataaaagaggtttaattgacacagttccgcgtggctggggaggcctcaggaaacttacaatcatggcagaaggcgaagcaggacacctcctgcctggcagcaggagagaaagaagggaaactgccactttaaaaacctcagatctctgccgggcgcggtggctaacgcctgtaatcccagcactttgggaggccgagacggacggttcaagaggtcaggagatcaagaccatcctgcctaacacggtgaaaccccgtctctactaaaaatacaaaaaaaaaaattagctgggagtgg

SEQ ID NO: 1076 - DNA, 601 bp, Human
tccctcgacacatgggtattacaattcgagatgagatttgggtggagacccaaagccaaaccatatcatcttagctgtaggcaaaaaaaatgggatatatctttattctttgactttctagaaatgccactatctcaaaaatataagcctaggagacagagggtgaaggtagggtaccattttctatggtagtggggatgagtgatgcttttttaatcctattagtttaatataggaaatggacaatgatcatgtaaatgaaattaattacataactaccaaatgaaccaaaaagaaacaraaaagggttctgtgagagagaactatggggaagattcaccttaaattagatgtgaatttcctttcactaatttctacttgaattatttaggcatactcaggactcctgttgtattttttaagattttgaatttggatcacctttctcatcacaacatttatcttatttttaatttttaaaaatatttaatttttaaacacttaattttgttgtcctctcctccaaacttttatccaaccaccattcacctttctcaagaagaggagctaccaaaataagctggcggtaaggccaggaggg

SEQ ID NO: 1077 - DNA, 601 bp, Human
ttatttaggcatactcaggactcctgttgtattttttaagattttgaatttggatcacctttctcatcacaacatttatcttatttttaatttttaaaaatatttaatttttaaacacttaattttgttgtcctctcctccaaacttttatccaaccaccattcacctttctcaagaagaggagctaccaaaataagctggcggtaaggccaggagggtaataacaaagcagaacagagtgcgtgtgcagaggctactgttccctgctctagatgtgaacctggggacttgtgccacaggrccctggagcaagaatcagagttccaaccaagatatctggacctgtcccactcatctcaaggatagattgtgccggcctaaatacattatacctggagagctgctggtgttctaggcctccgggaaaatagcagagctgtgatattaagctgagttcccctatccttgatcctcagggcaccagactttgtagttgaaggcatcacaagcagagaggttctacttgtcactttgcaacaaaactggcaattttttagctgttctagcacctgcccacaaggttactgtgccttacactgct

SEQ ID NO: 1078 - DNA, 601 bp, Human
tatttaggcatactcaggactcctgttgtattttttaagattttgaatttggatcacctttctcatcacaacatttatcttatttttaatttttaaaaatatttaatttttaaacacttaattttgttgtcctctcctccaaacttttatccaaccaccattcacctttctcaagaagaggagctaccaaaataagctggcggtaaggccaggagggtaataacaaagcagaacagagtgcgtgtgcagaggctactgttccctgctctagatgtgaacctggggacttgtgccacagggycctggagcaagaatcagagttccaaccaagatatctggacctgtcccactcatctcaaggatagattgtgccggcctaaatacattatacctggagagctgctggtgttctaggcctccgggaaaatagcagagctgtgatattaagctgagttcccctatccttgatcctcagggcaccagactttgtagttgaaggcatcacaagcagagaggttctacttgtcactttgcaacaaaactggcaattttttagctgttctagcacctgcccacaaggttactgtgccttacactgctg

SEQ ID NO: 1079 - DNA, 601 bp, Human
ccggcctaaatacattatacctggagagctgctggtgttctaggcctccgggaaaatagcagagctgtgatattaagctgagttcccctatccttgatcctcagggcaccagactttgtagttgaaggcatcacaagcagagaggttctacttgtcactttgcaacaaaactggcaattttttagctgttctagcacctgcccacaaggttactgtgccttacactgctgtgtgactccttcatttattatactcaggcaggcagatctggatatgaaggtgaatagatccaccagtaataaaaaaaaaaaaatactacctaaggaaacccagcagccagagaaaggaaatataagtagaacactcaggtaccaaactgacatttaggcagaatttctgcagctggttgatgacaattagaataaaaataataaagatttagggtaactttaggtttaaatcattttctaagactaaaatgtatgattttgagttcaaaaatttagaaggattcagtgagaatatggtccctatggagatctaaattagtggtccagaaggtgcactagaatatgtatctgaacaagagcaaagctgcaaa

SEQ ID NO: 1080 - DNA, 601 bp, Human
tgcagttgtgcgatctcggttcactgcaacctctgcctcctgggttcgagtgattctcccacctcagcctccccagtagctgggactacgggcatgcaccaccacacccagctaattttggtattttttggtagagacagggtttcaccatgttgtgcaggctggtctcgaactcctgacctcaggtgatccatccgccttggcctcccaaggtgctgggattacaggtgtgagccaccatgcccggcctcaatgtgctttttgtttttaacttagttaatcgttacaagaaccctttgasatagaaattctagagaaatataacatttgaataatgaaaaattttgtagtaaaggaataaagaaaaaacaagctataaaaatgtaatagaagaattctctcttgatgaagaaatgttaagtacagatagaaagagctcatcaagttccatgaaggattatgaaaaaataaaattaaaagatgcattcctagacatatggtaaaactcaattccaagtatcaacagtcaaatttagcatttcaatacaagaggttagaattgataaaaattacatttacaaaatatagaggttaaaggact

SEQ ID NO: 1081 - DNA, 601 bp, Human
tctttccactatctaagtatttttctctgtggtgcagtatgagtccaacttacctttgtctaggataataaaatatcaaaataattatttggatgaaatatccctttttcacactgaacttaaacacttttatattatacagtcagcccttcatatctatgggtttcataatcacagatttcaccacagactgaagatattttcaaaaataaataaatgaaaaataataaaataatacaaataaataattatgatgactatgtagcatctacattgtattaggtactctaaagataatttsaagtatacaaaaggatgtgcatagattatatgcaaatactatgccattttatacaaaatgagcatctgaggattttggtatccacagggttactgaaactgccccatatggatactaaaagacaactgtattcatttgccatatacaccaaataaattggaatttctcttttatctccggatactatttattcttaaacacaactattctgtttttattataatggctttatattatgtttgcatatcagataagatcatcttcactattctttcatttataacttttggctattttaaa

SEQ ID NO: 1082 - DNA, 601 bp, Human
tacagtcagcccttcatatctatgggtttcataatcacagatttcaccacagactgaagatattttcaaaaataaataaatgaaaaataataaaataatacaaataaataattatgatgactatgtagcatctacattgtattaggtactctaaagataatttcaagtatacaaaaggatgtgcatagattatatgcaaatactatgccattttatacaaaatgagcatctgaggattttggtatccacagggttactgaaactgccccatatggatactaaaagacaactgtattcattkgccatatacaccaaataaattggaatttctcttttatctccggatactatttattcttaaacacaactattctgtttttattataatggctttatattatgtttgcatatcagataagatcatcttcactattctttcatttataacttttggctattttaaaatttttattctttaatatgagtttgaagtcataacatctaaaaacccctctacctcatcaaaaataaataaataaattcttcctgtagctgtctttgtacttggaactgcatatgttattttgagagaagagttatt

SEQ ID NO: 1083 - DNA, 601 bp, Human
atactaaaagacaactgtattcatttgccatatacaccaaataaattggaatttctcttttatctccggatactatttattcttaaacacaactattctgtttttattataatggctttatattatgtttgcatatcagataagatcatcttcactattctttcatttataacttttggctattttaaaatttttattctttaatatgagtttgaagtcataacatctaaaaacccctctacctcatcaaaaataaataaataaattcttcctgtagctgtctttgtacttggaactgcayatgttattttgagagaagagttatttttataatactagtttttacatataagaaattgaatcttaattattgttttcatttctggctgattattttctaaaatgttattttcatatcattttcgaagatttataccaattattttttctttccctattgtaaatactagaacataaaaaataataatgattaatactggtgacattgcatactcttgtagtagttctagattaagggaaatgatcttaatacatcgccatttagaaatatgttcaatgttgagttttggtatatttttaa

SEQ ID NO: 1084 - DNA, 601 bp, Human
ttattttgagagaagagttatttttataatactagtttttacatataagaaattgaatcttaattattgttttcatttctggctgattattttctaaaatgttattttcatatcattttcgaagatttataccaattattttttctttccctattgtaaatactagaacataaaaaataataatgattaatactggtgacattgcatactcttgtagtagttctagattaagggaaatgatcttaatacatcgccatttagaaatatgttcaatgttgagttttggtatatttttaaaatyatatttatgtgggcaccttctattccagtgcttactttttataccacattgaatcatgcttcccaaacattacctcttaaatttacacctagagtggaagtgaatggggtaagagaagaatgttctttgtgctctggaaagtcagcattggtaacatgaggcacatatgcaatcatatacaggagactgtatcaaaaatggaataagattttcttcctatttagactagccccaggctagtaatcctatatgtatattttgcaacttcccactgaaatacccatgactaaactacagtgt

SEQ ID NO: 1085 - DNA, 601 bp, Human
gtggaagtgaatggggtaagagaagaatgttctttgtgctctggaaagtcagcattggtaacatgaggcacatatgcaatcatatacaggagactgtatcaaaaatggaataagattttcttcctatttagactagccccaggctagtaatcctatatgtatattttgcaacttcccactgaaatacccatgactaaactacagtgtaaattatgacaggcattcaagagtcagacagtatcagggctacacctctagctgcaaaccaataaatttgttctgttgcagaagtctaaatgtrtaggataataactctatttctcagtccagcttcatggatcctgtagaaaaacaatggttcagctatttgtctctttatacagatataagtcttcatcattatcatcatgatcattattttatcatgattacttgattataagctccatgagggcagggatttttctctattttttcatgtagaaatacccagtcactagaaaagcatttgacacataaaatgtactcatgtactcagtgtaaatgctatacacttcaaagtttattatttgcatatgtattttattcacactttcagtaa

SEQ ID NO: 1086 - DNA, 601 bp, Human
ctgggtgacatacagtattctaggaactgcagacaaaatagtaaatagaaaatagaaggtctttgccttcatagaacttgcttcttaaagcagtagttctcagattttgctgcacattggaatcacctaaagagtttttaaaacactgataccagcttctacctccagactttctgatttaattcgtgtctgatgcaacttgaaccttgggggttcttcaaaagttctccagataattgtaatgtgcaccagaatttttgaatcattggcctaatatacaagttggcattaaacaattccrggtttcttacttgagagtgataatagattgtgttacaaaagccaccactttacccactgtgtttagttcatattatattcatatgtttactattaatattattttaattatgtcctatattcttgaaccaaaaaaaagttccttatggtatttttgagaaaccaaccaacactattttctaaaaatacatttatcaaaaaggaggtgaaatatttaacatttcagttgagccagttatacacctacctctattaaatggagatgcaaatattgtttacttttatctcaatcaaatatcac

SEQ ID NO: 1087 - DNA, 601 bp, Human
ttcattaaaatgttcaagtctaaattgcactcagcatagtgaaactgctgctatttttcttaaacattatacctcttcagaacagatttgcaataggtactggcccaaactgataacttccttcccttcattttgcataatacagcaattttggtttcaaaatgccaccacaatcttaaatattctgactagctttgctgagtttgcagtagcaacaatgataatacccattgtaaaaacgaaatgcagaaatagtgactgtcaaatcctaacatgttccttatatccacacttcagtttycttaccagtataatctacattccagttaataatttaatgctaatcagctccttatcttctgaaaaggagagtctgctttgaatcataaggcagctgaccttgaaggtaggtttaatatatgcagatttcttatatcacctctaagctttttttactcagagcattttcttggttacatttagctcagagctgtgcaatcatcattttgtctatcctaacagtaactgatttaataacgatagtttttactcttccttagttttggactttacatttatttgtataactagttttaaataa

SEQ ID NO: 1088 - DNA, 601 bp, Human
ctacattccagttaataatttaatgctaatcagctccttatcttctgaaaaggagagtctgctttgaatcataaggcagctgaccttgaaggtaggtttaatatatgcagatttcttatatcacctctaagctttttttactcagagcattttcttggttacatttagctcagagctgtgcaatcatcattttgtctatcctaacagtaactgatttaataacgatagtttttactcttccttagttttggactttacatttatttgtataactagttttaaataacgtagtgttttaatrtgcaaataaaataaatataaatagttcaggtaaaccataaatactagaaagaatatagtagcatctttctaaacaaattctgctatttcacaaggtgcttatgtatttctgtcaactttctttagattttactgtcaaatggcattttttagtagtgatgtgataaagatttaaaattggttccttggactacattttgtgaattgaaattcaacatgaattgagaaatgagctatagaattttattatatataaaactgtaagcaaagctgtattattataataaaactatgtaagcaa

SEQ ID NO: 1089 - DNA, 601 bp, Human
tcaacatgaattgagaaatgagctatagaattttattatatataaaactgtaagcaaagctgtattattataataaaactatgtaagcaaagctatagaagttcagtttaaatttttaaaattttcaacaaatcgaggacaggaacatgtttcaaaaataatatcaaaattagaatttttacatgttataataacttcggtttaaatgtgttaatgagttaatgcgattgcatagatctaaactgaacaacaaaggaaagagataagaaaaaataatttttgtttatctaaaaattacacwtaatctgggctttaggaaaaaaatgtataaagctctttggaaatagaatcccatcataagaggcaatttcaaacttctttgtatatacatggtagtgacttgccttaaatattaaaatacccatctttgtttgttgtaatttgtgaatttacttgttttcccccatcaaaattaggaagaagaaaatacaagatttctatttcaaaagaggaagaatggttagattaggacagtggcagcaaggaaatatgatttttttttttaattgagatcctttttgagaaacaaaaggtggcttta

SEQ ID NO: 1090 - DNA, 601 bp, Human
ataatctgggctttaggaaaaaaatgtataaagctctttggaaatagaatcccatcataagaggcaatttcaaacttctttgtatatacatggtagtgacttgccttaaatattaaaatacccatctttgtttgttgtaatttgtgaatttacttgttttcccccatcaaaattaggaagaagaaaatacaagatttctatttcaaaagaggaagaatggttagattaggacagtggcagcaaggaaatatgatttttttttttaattgagatcctttttgagaaacaaaaggtggctttrctttgaattaaaaagtcatttatgttgggtagagttcttcacttaatggtttcctgcttacactgaaaaatacactgggttgatttagattgttattcttcttcatttagcttttagtgatctcatttgtgtaatcttcatacttgaaaagtagaatatgaaaacaacaagaactatagatgtgctttggagattgatatgtagtgcttttgctagtgaaaaataatctcaaagaaataagtttaaaaaacaaattttcttaactctattttacaataaaatgtttttatattgttatta

SEQ ID NO: 1091 - DNA, 601 bp, Human
tgcttcccaatttaacctttagaagtaaacttaaaagcactcataaatttctgttgaatgtagggtttaataacataggtcttatttatttaaggataattttcttctactatcacttaggcataaaattaatatagttttatttttaactacttaagttcttaatctaatgtagccttaatgaatttacccatgtaaagtacttgatgaagccatcatgaaaggctgcttggctaatatccatcagtccccttgctgaaaataactgaattttaatgtgaatatatataaaaaaaaccgktaactgtttcatgtatctaaggtttatgcaacttaatttaataatttcattttttaattgtgccatagacatgtttattgagttataaaaacaccacaatcacgaatgaatgggaaacacaaagaattagtattaagagtatgctgtttgttttgattatgatgcataactaaaaacctaaaattaactgtaacttaaattgtttctctgtggctttttttttctttctcatccaccctcttcattctcccttctcctctttaaataaataaaaatattctgaatgtagcttaactagtt

SEQ ID NO: 1092 - DNA, 601 bp, Human
cttctactatcacttaggcataaaattaatatagttttatttttaactacttaagttcttaatctaatgtagccttaatgaatttacccatgtaaagtacttgatgaagccatcatgaaaggctgcttggctaatatccatcagtccccttgctgaaaataactgaattttaatgtgaatatatataaaaaaaaccggtaactgtttcatgtatctaaggtttatgcaacttaatttaataatttcattttttaattgtgccatagacatgtttattgagttataaaaacaccacaatcaygaatgaatgggaaacacaaagaattagtattaagagtatgctgtttgttttgattatgatgcataactaaaaacctaaaattaactgtaacttaaattgtttctctgtggctttttttttctttctcatccaccctcttcattctcccttctcctctttaaataaataaaaatattctgaatgtagcttaactagttttagaagtagagaggaagattggttataaagaggaatgtaaattaatttataaacacaagttatctcaagttaaaatcaatataagagagcctgtaatctcca

SEQ ID NO: 1093 - DNA, 601 bp, Human
ctatcacttaggcataaaattaatatagttttatttttaactacttaagttcttaatctaatgtagccttaatgaatttacccatgtaaagtacttgatgaagccatcatgaaaggctgcttggctaatatccatcagtccccttgctgaaaataactgaattttaatgtgaatatatataaaaaaaaccggtaactgtttcatgtatctaaggtttatgcaacttaatttaataatttcattttttaattgtgccatagacatgtttattgagttataaaaacaccacaatcacgaatgratgggaaacacaaagaattagtattaagagtatgctgtttgttttgattatgatgcataactaaaaacctaaaattaactgtaacttaaattgtttctctgtggctttttttttctttctcatccaccctcttcattctcccttctcctctttaaataaataaaaatattctgaatgtagcttaactagttttagaagtagagaggaagattggttataaagaggaatgtaaattaatttataaacacaagttatctcaagttaaaatcaatataagagagcctgtaatctccatgtagc

SEQ ID NO: 1094 - DNA, 601 bp, Human
taaaaggcttttattttattttatttttttgaaacaaactctcactctgtcctcctggctggactgcagtggcatgatcttggctcactgcaacctccaccttccaggttcaaatgattctcctgcctcagcctcctgagtagttgggattataagcgcatgccaccacgcctgtctagtttttttgtatttttagtagagatagcgttttgccatgttgctgtggctggtctcaaactcctgggctcaagcaatctacttgccttggcctaccaaagtgctgggattacaggcgtgagcyaccgtgcctggctaaaagactttttttttcctccactataaaaaccaagggaaatactgtggaagtagataaaagcaaatcgactaaagtttagacaatattttgaaaaactaaaattctagaagggttctagaatttttgctttggattgccttatgggttgctttaacttttttctccattaaaaaataaaaaactagaaatcaaaggcaatgtatgagacttatgaaaaaaaatttagtaaagaaccccaatcagtgcattcttactcaatgaaaaggtcttggttttacaaacagt

SEQ ID NO: 1095 - DNA, 601 bp, Human
tcctcctggctggactgcagtggcatgatcttggctcactgcaacctccaccttccaggttcaaatgattctcctgcctcagcctcctgagtagttgggattataagcgcatgccaccacgcctgtctagtttttttgtatttttagtagagatagcgttttgccatgttgctgtggctggtctcaaactcctgggctcaagcaatctacttgccttggcctaccaaagtgctgggattacaggcgtgagctaccgtgcctggctaaaagactttttttttcctccactataaaaaccaagggaaatactgtggaagtagataaaagcaaatcgactaaagtttagacaatattttgaaaaactaaaattctagaagggttctagaatttttgctttggattgccttatgggttgctttaacttttttctccattaaaaaataaaaaactagaaatcaaaggcaatgtatgagacttatgaaaaaaaatttagtaaagaaccccaatcagtgcattcttactcaatgaaaaggtcttggttttacaaacagtagcatccatatccccctatgtaaaataagatgaagtaaagatatatctt

SEQ ID NO: 1096 - DNA, 601 bp, Human
ctaaaagactttttttttcctccactataaaaaccaagggaaatactgtggaagtagataaaagcaaatcgactaaagtttagacaatattttgaaaaactaaaattctagaagggttctagaatttttgctttggattgccttatgggttgctttaacttttttctccattaaaaaataaaaaactagaaatcaaaggcaatgtatgagacttatgaaaaaaaatttagtaaagaaccccaatcagtgcattcttactcaatgaaaaggtcttggttttacaaacagtagcatccatatccccctatgtaaaataagatgaagtaaagatatatctttttatgactttctgttttaattattttatttgcttaatcagttgggtaaattatgagtcctagaatttaagaaaagagggcttccactgtactttgtactctccttcagagaaaagctaaagaaaccgcttcttttgctaggctgaggctgactgaattccgtgggtgtttctacatctgaatatcattacaaagactacccacttgaggagatatgcttgctattcaaatctaccatatcttctggaaattcttgagttctt

SEQ ID NO: 1097 - DNA, 601 bp, Human
ttttttctccattaaaaaataaaaaactagaaatcaaaggcaatgtatgagacttatgaaaaaaaatttagtaaagaaccccaatcagtgcattcttactcaatgaaaaggtcttggttttacaaacagtagcatccatatccccctatgtaaaataagatgaagtaaagatatatctttttatgactttctgttttaattattttatttgcttaatcagttgggtaaattatgagtcctagaatttaagaaaagagggcttccactgtactttgtactctccttcagagaaaagctaaakaaaccgcttcttttgctaggctgaggctgactgaattccgtgggtgtttctacatctgaatatcattacaaagactacccacttgaggagatatgcttgctattcaaatctaccatatcttctggaaattcttgagttcttactctatgaaatgaagaaaataacataaactaacatgcatggggcacaggtttcttcttgaatgccaactctgattagttgctaattgctacttgaagatctgtgcttagatccatctgtagcccctttcaccttagagtcaaatgcctggatccggta

SEQ ID NO: 1098 - DNA, 601 bp, Human
taactcatttaaaataaggactacttcacgcaaataaaaaccacttctgtctacttctctaaaaactgaataacctatgtctagtcttcattaaagaaagccaaaaaagaaagtttattccaacatattatcttcacaattaagagtatacagaatatgagggcaagaggactattccaatgatcactgtttgatttagtgaatctggctgctaaattgactctaagctattttctttacagtttgtcacatggtttagagtactttaagaggccagccttcccgggtgaaaagtacaatrgtttctaagacagagtattcataaggtttgtggtgttaagaaatattacttttctgcaatctttaacaaatgtggaaaaggacattctgaatttataatgtaaatggggctggaattctttcttggaaaatagaatcaataaacatattttcagaagtaaaatatattgattgagaactattgtctaaatattccccaaaccctagatgttccttgtcaaatatacacacagaagatgtactgtgctatatagatgaggattgatgataggaatatgtagatctacacgttagggataat

SEQ ID NO: 1099 - DNA, 601 bp, Human
tgtctaaatattccccaaaccctagatgttccttgtcaaatatacacacagaagatgtactgtgctatatagatgaggattgatgataggaatatgtagatctacacgttagggataattttatttcagtttaatgacatcagaattcaaaagaaatgaaacattatacatgtaacaattattgaaatgcctcccatgtactagcagctgtactggttctgcccttgggaagtttattagcatagctgggacacaggcctataaatagataattaaagagaatattgttaaaggccatatwagggttacgcctagggggctgtcaggatatgtcataactccccacatttcaaattacaaaatttgctttactccaaaataaaggtagctttattgtacatttaagaaaacttgaaattgtaaagtgtttatgtgaaatgttaacttacagacttgatttaccaaatttatagcagtaaagtaagtcccatttttcagaatatgaggtatgtgatttcagctccttaaatgggatacctcacattattattacagtttaaaacctatgagattttcttttctatttttaatccttctctta

SEQ ID NO: 1100 - DNA, 601 bp, Human
gaaataagcagaatatggcctgctgaagaaggttacagttttacagcccctcccattgcagctcttaagtcactcagttacagttaactttggattagcactcacagattgaaagcaaaacacatcaaaacactcatcacgcactctgggcttgtggtgccacttgtatgtgtgtttctaaatcaatgatgagggtatcagaaccaatactggacatggacatggcaaattacagtgaagttttggacccaacttacacaactttggagtttgaaactatgcagattctatataattcaartggtgagttatcatctgtttatagatgtaaagaaaagtaagtataattggagaaggtggaagactgagcttccaaaggtggtggctcaatgttttttttgctggagaatttagggcttgcttttaaggccacagatctgagcttttgcacttcattacaaaatttaagttaataatgctgtggctattttgtgttagaggtagaaaaagcctggttttgtgtaataaagtaatgtcagaattctgtcatgggccagttagacaggtaaaaagagtagtctcagctgttattttatttgct

SEQ ID NO: 1101 - DNA, 601 bp, Human
ttgaaagcaaaacacatcaaaacactcatcacgcactctgggcttgtggtgccacttgtatgtgtgtttctaaatcaatgatgagggtatcagaaccaatactggacatggacatggcaaattacagtgaagttttggacccaacttacacaactttggagtttgaaactatgcagattctatataattcaaatggtgagttatcatctgtttatagatgtaaagaaaagtaagtataattggagaaggtggaagactgagcttccaaaggtggtggctcaatgttttttttgctggagartttagggcttgcttttaaggccacagatctgagcttttgcacttcattacaaaatttaagttaataatgctgtggctattttgtgttagaggtagaaaaagcctggttttgtgtaataaagtaatgtcagaattctgtcatgggccagttagacaggtaaaaagagtagtctcagctgttattttatttgctgtaaatcatagtaatatgtcatattggcagattggctgtgaaagtatattttctaagcaatatttaaaatgacttatggaacaaagtttccatagaacattagggagt

SEQ ID NO: 1102 - DNA, 601 bp, Human
catgagttttttaggggtagtgtctttatgtaatacagcttactattgactttgaatttagacttaatacccggtaaaaaaaatcttgtttaaaatatgttataactgttagaactcctaagatcgagtaattatgtatactttggaaaatgtgtatgtgtgtgtgtgtgtgtgtgtgtgtgtgtgtgttgtttaatgcaagattgagaatatatcttgtactgaggatatcttactattctactgtattgtataatttgtatgactggtgttctggttctatttttaataagcagttccktattagtggggattttaaaaaatagtcaaaaggtgaattctgaaaatttagcacaactatagttaaaataaacctgtagtgcaactttcaggaaatcactgttttgtgtccttatgtttagacttgactagagatatttaatagagtatttcatcagaatcctgaatttaaaaaacactcatgattaagaaatggtagggacatatttgccataatcataacacttatttactataagtgtttaacaaatgtactgaaataacgaatttgtatggctatatccaaagtatggtgtaactt

SEQ ID NO: 1103 - DNA, 601 bp, Human
tggtgttctggttctatttttaataagcagttccttattagtggggattttaaaaaatagtcaaaaggtgaattctgaaaatttagcacaactatagttaaaataaacctgtagtgcaactttcaggaaatcactgttttgtgtccttatgtttagacttgactagagatatttaatagagtatttcatcagaatcctgaatttaaaaaacactcatgattaagaaatggtagggacatatttgccataatcataacacttatttactataagtgtttaacaaatgtactgaaataacgawtttgtatggctatatccaaagtatggtgtaacttgtttgtttgtaataatgttgtcagcaatatgtaagtatggcactaaacttgaagcaagagttgaatttttcatatttctatatagtctctcagaatacaatcaattccaaacagttctaactttcatattgtcaatatctgttttgttaatgttaccagaagaaaaatgtttagcattttaatcctatgtcacatgactaaccctaagcatattctcattaaaatttttttctacttcatgaaattatatatgacaatatttgtct

SEQ ID NO: 1104 - DNA, 601 bp, Human
tagtgaaaagttgtgaattaaatatgtatttcaggccaggcgcagtggctcacgcctataatttcagcactttgggattataggtgggcagaccgcctgctgaggtgggcagaccgcctgaggtcaggggttcaagaacagcctggccaacatggtgaaaccccgtctctactaaaaatacaaaaataagcctggcatggtgacacacgtctgtaatctcagctactcaggaggctgaggcatgggaatcacttgaacctgggaggcagaggttgcagtgagccgagatcgcaccactacwctctagcctgagcaacagggggaactcaggctcaaaaaattaagtaaataaataaataaaaagtattgtaaacatggacttaccaagggattggttataaaagataaaggagagaatacaataaagactcacagattattggccctgggaaactggatggatccattgactgatacaggggagactgaaggaaggaagaacaagttctaggggaaaaatgaaagacttttgtttttgatatgttaatttacaattctgattagatttcacaatgaagttcttcaataggtgcttgggcat

SEQ ID NO: 1105 - DNA, 601 bp, Human
aattaaatatgtatttcaggccaggcgcagtggctcacgcctataatttcagcactttgggattataggtgggcagaccgcctgctgaggtgggcagaccgcctgaggtcaggggttcaagaacagcctggccaacatggtgaaaccccgtctctactaaaaatacaaaaataagcctggcatggtgacacacgtctgtaatctcagctactcaggaggctgaggcatgggaatcacttgaacctgggaggcagaggttgcagtgagccgagatcgcaccactacactctagcctgagcarcagggggaactcaggctcaaaaaattaagtaaataaataaataaaaagtattgtaaacatggacttaccaagggattggttataaaagataaaggagagaatacaataaagactcacagattattggccctgggaaactggatggatccattgactgatacaggggagactgaaggaaggaagaacaagttctaggggaaaaatgaaagacttttgtttttgatatgttaatttacaattctgattagatttcacaatgaagttcttcaataggtgcttgggcatttcatgttgatgccc

SEQ ID NO: 1106 - DNA, 601 bp, Human; identical to SEQ ID NO: 547

SEQ ID NO: 1107 - DNA, 601 bp, Human; identical to SEQ ID NO: 548

SEQ ID NO: 1108 - DNA, 601 bp, Human; identical to SEQ ID NO: 549

SEQ ID NO: 1109 - DNA, 601 bp, Human; identical to SEQ ID NO: 550

SEQ ID NO: 1110 - DNA, 601 bp, Human; identical to SEQ ID NO: 551

SEQ ID NO: 1111 - DNA, 601 bp, Human; identical to SEQ ID NO: 552

SEQ ID NO: 1112 - DNA, 601 bp, Human; identical to SEQ ID NO: 553

SEQ ID NO: 1113 - DNA, 601 bp, Human; identical to SEQ ID NO: 554

SEQ ID NO: 1114 - DNA, 601 bp, Human; identical to SEQ ID NO: 555

SEQ ID NO: 1115 - DNA, 601 bp, Human; identical to SEQ ID NO: 556

SEQ ID NO: 1116 - DNA, 601 bp, Human; identical to SEQ ID NO: 557

SEQ ID NO: 1117 - DNA, 601 bp, Human; identical to SEQ ID NO: 558

SEQ ID NO: 1118 - DNA, 601 bp, Human; identical to SEQ ID NO: 559

SEQ ID NO: 1119 - DNA, 601 bp, Human; identical to SEQ ID NO: 560

SEQ ID NO: 1120 - DNA, 601 bp, Human; identical to SEQ ID NO: 561

SEQ ID NO: 1121 - DNA, 601 bp, Human; identical to SEQ ID NO: 562

SEQ ID NO: 1122 - DNA, 601 bp, Human; identical to SEQ ID NO: 563

SEQ ID NO: 1123 - DNA, 601 bp, Human; identical to SEQ ID NO: 564

SEQ ID NO: 1124 - DNA, 601 bp, Human; identical to SEQ ID NO: 565

SEQ ID NO: 1125 - DNA, 601 bp, Human; identical to SEQ ID NO: 566

SEQ ID NO: 1126 - DNA, 601 bp, Human; identical to SEQ ID NO: 567

SEQ ID NO: 1127 - DNA, 601 bp, Human; identical to SEQ ID NO: 568

SEQ ID NO: 1128 - DNA, 601 bp, Human; identical to SEQ ID NO: 569

SEQ ID NO: 1129 - DNA, 601 bp, Human; identical to SEQ ID NO: 570

SEQ ID NO: 1130 - DNA, 601 bp, Human; identical to SEQ ID NO: 571

SEQ ID NO: 1131 - DNA, 601 bp, Human; identical to SEQ ID NO: 572

SEQ ID NO: 1132 - DNA, 601 bp, Human; identical to SEQ ID NO: 573

SEQ ID NO: 1133 - DNA, 601 bp, Human; identical to SEQ ID NO: 574

SEQ ID NO: 1134 - DNA, 601 bp, Human; identical to SEQ ID NO: 575

SEQ ID NO: 1135 - DNA, 601 bp, Human; identical to SEQ ID NO: 576

SEQ ID NO: 1136 - DNA, 601 bp, Human; identical to SEQ ID NO: 604

SEQ ID NO: 1137 - DNA, 601 bp, Human; identical to SEQ ID NO: 605

SEQ ID NO: 1138 - DNA, 601 bp, Human; identical to SEQ ID NO: 606

SEQ ID NO: 1139 - DNA, 601 bp, Human; identical to SEQ ID NO: 607

SEQ ID NO: 1140 - DNA, 601 bp, Human; identical to SEQ ID NO: 608

SEQ ID NO: 1141 - DNA, 601 bp, Human; identical to SEQ ID NO: 609

SEQ ID NO: 1142 - DNA, 601 bp, Human; identical to SEQ ID NO: 610

SEQ ID NO: 1143 - DNA, 601 bp, Human; identical to SEQ ID NO: 611

SEQ ID NO: 1144 - DNA, 601 bp, Human; identical to SEQ ID NO: 612

SEQ ID NO: 1145 - DNA, 601 bp, Human; identical to SEQ ID NO: 613

SEQ ID NO: 1146 - DNA, 601 bp, Human; identical to SEQ ID NO: 614

SEQ ID NO: 1147 - DNA, 601 bp, Human; identical to SEQ ID NO: 615

SEQ ID NO: 1148 - DNA, 601 bp, Human; identical to SEQ ID NO: 616

SEQ ID NO: 1149 - DNA, 601 bp, Human; identical to SEQ ID NO: 617

SEQ ID NO: 1150 - DNA, 601 bp, Human; identical to SEQ ID NO: 618

SEQ ID NO: 1151 - DNA, 601 bp, Human; identical to SEQ ID NO: 619

SEQ ID NO: 1152 - DNA, 601 bp, Human; identical to SEQ ID NO: 687

SEQ ID NO: 1153 - DNA, 601 bp, Human; identical to SEQ ID NO: 688

SEQ ID NO: 1154 - DNA, 601 bp, Human; identical to SEQ ID NO: 689

SEQ ID NO: 1155 - DNA, 601 bp, Human; identical to SEQ ID NO: 690

SEQ ID NO: 1156 - DNA, 601 bp, Human; identical to SEQ ID NO: 691

SEQ ID NO: 1157 - DNA, 601 bp, Human; identical to SEQ ID NO: 692

SEQ ID NO: 1158 - DNA, 601 bp, Human; identical to SEQ ID NO: 693

SEQ ID NO: 1159 - DNA, 601 bp, Human; identical to SEQ ID NO: 694

SEQ ID NO: 1160 - DNA, 601 bp, Human; identical to SEQ ID NO: 695

SEQ ID NO: 1161 - DNA, 601 bp, Human; identical to SEQ ID NO: 696

SEQ ID NO: 1162 - DNA, 601 bp, Human; identical to SEQ ID NO: 697

SEQ ID NO: 1163 - DNA, 601 bp, Human; identical to SEQ ID NO: 698

SEQ ID NO: 1164 - DNA, 601 bp, Human; identical to SEQ ID NO: 699

SEQ ID NO: 1165 - DNA, 601 bp, Human; identical to SEQ ID NO: 700

SEQ ID NO: 1166 - DNA, 601 bp, Human; identical to SEQ ID NO: 701

SEQ ID NO: 1167 - DNA, 601 bp, Human; identical to SEQ ID NO: 702

SEQ ID NO: 1168 - DNA, 601 bp, Human; identical to SEQ ID NO: 703

SEQ ID NO: 1169 - DNA, 601 bp, Human; identical to SEQ ID NO: 704

SEQ ID NO: 1170 - DNA, 601 bp, Human; identical to SEQ ID NO: 705

SEQ ID NO: 1171 - DNA, 601 bp, Human; identical to SEQ ID NO: 706

SEQ ID NO: 1172 - DNA, 601 bp, Human
cagtgaaccttgatcgcaccactgtacttcagcctgggtgacagagcaagactctgtgtcaaaaaaaaaaaaaaaaaaaagcgagagagagagaaagaaaagtagtaacatttacggggaactcactctgtgccaggtactttacatgcattatctcatttaattgctccagcaccctatgaggcggtatggttattactcccattttacaaatgagaaaactgaggcactgaagagttaaagaacttacccaagtcccacagctagaataggatggagcaggaatgaatcctgggggctkctacttcccaggcccactctttttttttttttttttttgagatgaagtttcgctcttgttgaccaggctggagtgcaatggcgtgatctcagctcattgcagcctctgtttcccaggttcaagtgattctcctgcctcagcctcctgagtagctgggattacaggcacctgccaccacgcctggctaatttttgtatttttagtagagatggggtttcaccatgttggccaggctggtctcgaactgctgacctcaggtgatccacccacctcagcctcccaagacccactcttaatcta

SEQ ID NO: 1173 - DNA, 601 bp, Human
ttattcaacaatcctttgttttttttttgagacagaatctcactctggctggagtcacgcaggctggagcgcagtggcactatctctgctcactgcaaactctacctcccaggctcaggcgatcctcccacctcagcctctagagcagctgggactataggcacggtccccatgcccagctaatttttgtacactttgtagagaccaagtttcgccatgttgcccaggctggtcccaaacttgtgggctcaagcaatccgcttgcctcggcctcccaaactgatgggattataggccagakccactgcacctggccctcaattcttatgtagttgtaaaataccttgttgtacctttttcttttcctaatccattttatttttttttctttcagaccaacagtcttttcttcctggcagaaagtccttggtgcacatctgatagatgtcagtgtttgccctctacataggagaaaagcagggctgagtgcagtggctcaggcctacaatccaagcactttgggaggctgaggcagaaggcacacttgagcccagtagcccaagaccagcctgggtatagtgagaccccgtctcttcaaaat

SEQ ID NO: 1174 - DNA, 601 bp, Human
ttactccaggctgggcacagtggctcacgcctgtaatcccagcagtttgggaggccaaggcgggaggatcacttgagaccaggagtttgagaccagcttgagcaacatggtgaaaccccatctgtactaaaaatacaaaaataagccaggcgtggtggcatatgcctgtagtcccagctagtagggaggctaaggcaggagaatcgcttgaacctgggagatggaggttgcagtgagccgagatcacgccattgcactccagtctgggaaacagagcaagactctgtctcaaaaaaaaaawaaataaataaataaattactccagctactacgtgcagagcagaagggagaccaggttactgcagaggccaacagacagcagatgggcacttgggtaatggaacgggccacggtaggggttaaaagtaccagctttgaggactactgaggatgcaaattaaaaagacttgctatcccatgaggcaaatgcaaataaaaatcagcatgagacaccacttctcaccctgtgagttcgacttagagagttcaactttttcagattccacatgtgagatcatgcagtgtttgtcttcccgtgcct

SEQ ID NO: 1175 - DNA, 601 bp, Human
aaaattactccaggctgggcacagtggctcacgcctgtaatcccagcagtttgggaggccaaggcgggaggatcacttgagaccaggagtttgagaccagcttgagcaacatggtgaaaccccatctgtactaaaaatacaaaaataagccaggcgtggtggcatatgcctgtagtcccagctagtagggaggctaaggcaggagaatcgcttgaacctgggagatggaggttgcagtgagccgagatcacgccattgcactccagtctgggaaacagagcaagactctgtctcaaaaaawaaataaataaataaataaattactccagctactacgtgcagagcagaagggagaccaggttactgcagaggccaacagacagcagatgggcacttgggtaatggaacgggccacggtaggggttaaaagtaccagctttgaggactactgaggatgcaaattaaaaagacttgctatcccatgaggcaaatgcaaataaaaatcagcatgagacaccacttctcaccctgtgagttcgacttagagagttcaactttttcagattccacatgtgagatcatgcagtgtttgtcttcccgt

SEQ ID NO: 1176 - DNA, 601 bp, Human
gcagactattgtcaatggtaaagacacacattaagaaactacatgagaatgtaataaactgtaactgtagtaagtactaagaagaaaaacacaggagtggttaaaaagagaggtctggggagcaacatttcagctgaggagaggagggagaagagagtgattcagagagagggaacagcatgtgggaaggcctgaggcaggcggagctcagaacctttgagcatctggaatttggccagtgtggctggagcgtggggaaaggagggcaaaccggggtgagggccacagaaaagactgggtrttcactccatattcactccatctgttccctccatgtgctctgtagccaaggagtgggatggaaggatttgaactttaaaaaaattactccaggctgggcacagtggctcacgcctgtaatcccagcagtttgggaggccaaggcgggaggatcacttgagaccaggagtttgagaccagcttgagcaacatggtgaaaccccatctgtactaaaaatacaaaaataagccaggcgtggtggcatatgcctgtagtcccagctagtagggaggctaaggcaggagaatcgcttgaacctgg

SEQ ID NO: 1177 - DNA, 601 bp, Human
ggactccaggaagcacagtaccctcgggtaagcaagacagctgcccccagcagactattgtcaatggtaaagacacacattaagaaactacatgagaatgtaataaactgtaactgtagtaagtactaagaagaaaaacacaggagtggttaaaaagagaggtctggggagcaacatttcagctgaggagaggagggagaagagagtgattcagagagagggaacagcatgtgggaaggcctgaggcaggcggagctcagaacctttgagcatctggaatttggccagtgtggctggagcrtggggaaaggagggcaaaccggggtgagggccacagaaaagactgggtgttcactccatattcactccatctgttccctccatgtgctctgtagccaaggagtgggatggaaggatttgaactttaaaaaaattactccaggctgggcacagtggctcacgcctgtaatcccagcagtttgggaggccaaggcgggaggatcacttgagaccaggagtttgagaccagcttgagcaacatggtgaaaccccatctgtactaaaaatacaaaaataagccaggcgtggtggcatatgcctg

SEQ ID NO: 1178 - DNA, 601 bp, Human
ctttgggaggttgagatgggtagactgcttgagcccaggagttctcagccagcccgggcaacatggtgaaacctcgtctctactaaaaattcaaaaatttgctgggcatgatgtgcacctgtaatcccaactactcaggaggctgaggtggaaggatcacttgagcacgggacgcagaggttgcagtaagctgagatcgcaccactgcactccagcctgggtgacagtgcaagaccctgtctcaaaaaaaaaaaaaaagaaaaaagaaaaaatcccttctatctgagtgtgatggcaaacrcttgaatcccagcacttcgagaagctaagtaaggtaggaggatcacttgagccctggagtttgagaccagattgggcaacatagggaaatcctgtctctatcaaaaaaattttaaaaattagctgggtgtggtggcacacgcctgtggtcccagctactcacgaggctgaggtgggaggatcacttgagcccaggaattcaaggttgcagtgagctatggttgcaccactgcactccagcctgggccacaaaatgagaccctgtctcaaaaaaaaaaaaaaaattcttttctaattctct

SEQ ID NO: 1179 - DNA, 601 bp, Human
atgtgaacaagcattgctctaagtgttggggatatagcggtgaacaaacaagacagacaaaaatccctcccctatagctgttctactgcttgattttgttacagacaaagagagaggggtgggggtgaggggaagggaagaaaatgttgattaaaaaattctcttctgggcacgacggctcatgcctataaatcccagcactttgggaggttgagatgggtagactgcttgagcccaggagttctcagccagcccgggcaacatggtgaaacctcgtctctactaaaaattcaaaaatttkctgggcatgatgtgcacctgtaatcccaactactcaggaggctgaggtggaaggatcacttgagcacgggacgcagaggttgcagtaagctgagatcgcaccactgcactccagcctgggtgacagtgcaagaccctgtctcaaaaaaaaaaaaaaagaaaaaagaaaaaatcccttctatctgagtgtgatggcaaacacttgaatcccagcacttcgagaagctaactaaggtaggaggatcacttccctttgccattctaaattgtgtctgaatttggtaccttaaattgcatgaca

SEQ ID NO: 1180 - DNA, 601 bp, Human
cattcattcactcgtctattcagccattcaatcattcaacatattgggcgcccaatgtgaacaagcattgctctaagtgttggggatatagcggtgaacaaacaagacagacaaaaatccctcccctatagctgttctactgcttgattttgttacagacaaagagagaggggtgggggtgaggggaagggaagaaaatgttgattaaaaaattctcttctgggcacgacggctcatgcctataaatcccagcactttgggaggttgagatgggtagactgcttgagcccaggagttctcrgccagcccgggcaacatggtgaaacctcgtctctactaaaaattcaaaaatttgctgggcatgatgtgcacctgtaatcccaactactcaggaggctgaggtggaaggatcacttgagcacgggacgcagaggttgcagtaagctgagatcgcaccactgcactccagcctgggtgacagtgcaagaccctgtctcaaaaaaaaaaaaaaagaaaaaagaaaaaatcccttctatctgagtgtgatggcaaacacttgaatcccagcacttcgagaagctaactaaggtaggaggatcac

SEQ ID NO: 1181 - DNA, 601 bp, Human
ccccacacacacaccacatacacacagcccaccccacacacacacagcccaccccccacacacacatatgcacacacaataggcttggctcacctcccatctgattcgctctgtgtattcattcattcactcgtctattcagccattcaatcattcaacatattgggcgcccaatgtgaacaagcattgctctaagtgttggggatatagcggtgaacaaacaagacagacaaaaatccctcccctatagctgttctactgcttgattttgttacagacaaagagagaggggtgggggtgrggggaagggaagaaaatgttgattaaaaaattctcttctgggcacgacggctcatgcctataaatcccagcactttgggaggttgagatgggtagactgcttgagcccaggagttctcagccagcccgggcaacatggtgaaacctcgtctctactaaaaattcaaaaatttgctgggcatgatgtgcacctgtaatcccaactactcaggaggctgaggtggaaggatcacttgagcacgggacgcagaggttgcagtaagctgagatcgcaccactgcactccagcctgggtgacagt

SEQ ID NO: 1182 - DNA, 601 bp, Human
ccccacatgcctccagtacacacacacacctcccacacacaccccacacatacacacccataccccacccccacacatatgcacacatacatacaccacacacacatcatacacacaccacacacataccccacacacacaccacacacatacacacccaccccccacacacataggcagaaatacacacaccacacacaccacacatacacacatacagcccacacaccccccacacacacacaccccacacacacaccacatacacacagcccaccccacacacacacagcccaccccmcacacacacatatgcacacacaataggcttggctcacctcccatctgattcgctctgtgtattcattcattcactcgtctattcagccattcaatcattcaacatattgggcgcccaatgtgaacaagcattgctctaagtgttggggatatagcggtgaacaaacaagacagacaaaaatccctcccctatagctgttctactgcttgattttgttacagacaaagagagaggggtgggggtgaggggaagggaagaaaatgttgattaaaaaattctcttctgggcacgacggctcat

SEQ ID NO: 1183 - DNA, 601 bp, Human
acacacacgcacacatgccccctacatgtacacacactacacaccccacacccccacatgcctccagtacacacacacacctcccacacacaccccacacatacacacccataccccacccccacacatatgcacacatacatacaccacacacacatcatacacacaccacacacataccccacacacacaccacacacatacacacccaccccccacacacataggcagaaatacacacaccacacacaccacacatacacacatacagcccacacaccccccacacacacacaccccmcacacacaccacatacacacagcccaccccacacacacacagcccaccccccacacacacatatgcacacacaataggcttggctcacctcccatctgattcgctctgtgtattcattcattcactcgtctattcagccattcaatcattcaacatattgggcgcccaatgtgaacaagcattgctctaagtgttggggatatagcggtgaacaaacaagacagacaaaaatccctcccctatagctgttctactgcttgattttgttacagacaaagagagaggggtgggggtgagggg

SEQ ID NO: 1184 - DNA, 601 bp, Human
gtcctgagcacagcaggatgtttacagcatcctgtgaacatggtgccagtagcacccctctccccagctgcgacaacccaaatgtcttccaacattgttaagtgtcccctggtggggaagtgctccatttgagaaccactggatcagagagaagctgaaacctacttctctaacactgcagctactgcagctgtttgaattgctcctgtgacattcctgccacgtggggcatttgccaactgcagcaaatgtgctcttgcaccatctcaaacataaactcccagaaaatcaaagagaaaaagagaaaattttagctattttggccactgaaaatttcctttcagacaatctttaatgacaagaggaaattcattagtaatgaagagcaggagacagacatggaaagagctgcgggcttaaaatctacaggcctcagttttgaatctacctgttgccacttttcagcttaatttctaggatcttcagtttcttcatctctgaaatgaggacaatcacactccctaccagagtgtttgccaggattaattacgaccatgtctagctgcagaggtgaatctgctgttggagagagcttgggacg

SEQ ID NO: 1185 - DNA, 601 bp, Human
acaagcgtcagcctctgcagagatcacagcttaggtcaggaagcagccccagggttccagggccctcccgctttacttcggtttcgtagaaagatgtaacagaatctgaagatccatagtcttgagactactccattccttgaaacctaccctcaacccaccttgggttacaggctttctcaaccatggcacttttgacacttggggtctgataattctttgttatgggggctgtcctgagcacagcaggatgtttacagcatcctgtgaacatggtgccagtagcacccctctccccagmtgcgacaacccaaatgtcttccaacattgttaagtgtcccctggtggggaagtgctccatttgagaaccactggatcagagagaagctgaaacctacttctctaacactgcagctactgcagctgtttgaattgctcctgtgacattcctgccacgtggggcatttgccaactgcagcaaatgtgctcttgcaccatctcaaacataaactcccagaaaatcaaagagaaaaagagaaaattttagctattttggccactgaaaatttcctttcagacaatctttaatgacaagaggaaa

SEQ ID NO: 1186 - DNA, 601 bp, Human
agctacttgggaggccgaggcaggagaatcgtttgaacccgggaggcagaggttgcagtgtgctgagatcacaccattgcactccagcctgggtgacagggcgagactccatctcaaaaataaataaataaaaataaagtgaggattgtaatagtacctctaaacacagtcaggacagtgcctggcacataggaactcattaataaaagttagttgctatttaaataacactggccacatgcagtgtttcacctctgtcatctcagcacttggggaggccgaggtgggtggatcacttgaygccaggagtttgagaccagcctggccaatatggtgaaaccctgtctctactaaaaatacaaagattagctgcgcgtggtggcagacacctgtaatcccagctacttgggaagctgaggcaggagaatggcttgaacccaggaggtggaggttgcagtgagccaatttcacaccactgcactccagcctgggcgtcagagcaagactctacctcaaaaaataaagaaataaataacacccacaaatacttaagaaaacggcaaatagccaaatagtgtttatcagactcctaagtagacag

SEQ ID NO: 1187 - DNA, 601 bp, Human
ctccgtctctaataaagatacaaaaaattagctgggtgtggtggcatgcgcctgtaatcccagctacttgggaggccgaggcaggagaatcgtttgaacccgggaggcagaggttgcagtgtgctgagatcacaccattgcactccagcctgggtgacagggcgagactccatctcaaaaataaataaataaaaataaagtgaggattgtaatagtacctctaaacacagtcaggacagtgcctggcacataggaactcattaataaaagttagttgctatttaaataacactggccacaygcagtgtttcacctctgtcatctcagcacttggggaggccgaggtgggtggatcacttgacgccaggagtttgagaccagcctggccaatatggtgaaaccctgtctctactaaaaatacaaagattagctgcgcgtggtggcagacacctgtaatcccagctacttgggaagctgaggcaggagaatggcttgaacccaggaggtggaggttgcagtgagccaatttcacaccactgcactccagcctgggcgtcagagcaagactctacctcaaaaaataaagaaataaataacaccc

SEQ ID NO: 1188 - DNA, 601 bp, Human
gttttcctcaggttaatttataaattcagagcaatgccagtcagaatctttcttccgggattttgagaagctgacttaaaattttaaatggaagagtaaaggagcatgaataactaagataaatttgaaagcaactgactttccacttggaaaaataaaataaaattagttttctctcatcactcaatatatacaaaataaaacaccagatctatctggaagaacaaaattgtgaaataaattttaaaaatatagaagaggctaggcgtagcggttcgtgcctgtaatcccagcactttgrgaggccaaggtgggaggattgcttgagcccagaagtttgagaccagccagagaaacctagtgagaccctgtctctacaaaaactaaaaaatgagctgagcaccatggcacacacctatagttccagctatttagcaggctgaggcagaaggatcccttaagcccaggagttcaaggctgcaatgagctgtgatcatgccactgcactcccacctaggtgacagagtgagaccctgtctcacacatatatatttatagtgtttgctttgtaagtgtcctcagttgagaagcaaaatctata

SEQ ID NO: 1189 - DNA, 601 bp, Human
gacatggtggcaggtgcctgtaatctcagctatttgggaggctgaggcagtataatcacttgaacccgggaggcagaggttgcagtgagccaagattgcgccattgcactccagcctgggtgacagagcaagactctgtctcaaaaaaataaaaaaataaaataaaaatagtactataggaaagaacaaaaaactataaaagttatctaaaacaatgatagaaagtagattttaaaaacgaataaatagaacttattgaaatgaaaaatataatcattaaaaacgtagcaggtttattacrtccgaagagagaattaatgaataggaaggtagacctgcagaaattacctagaaagcacccgagagaggtaagaagatgggaaatataagagattcaaagacacggaggaacttcatggagaaaatcggggaggggcaatatttgtagagatattggctgaaaaagtctcagaactgatgacaaagacatgaaacttcagacaaggaaccacagtgactcccaggataaagaaaactaaatccttggtcctttacgatgaaactttattggaggacatgtaagaagacctgaagacaatgg

SEQ ID NO: 1190 - DNA, 601 bp, Human
atatttatatattatatatatttatatatattatatatttatatattatatatatttatatatattatatatttatatattatatatatttatatataatatatattatatatttatatattatatatatttatatatattatatatttatatattatatatatttatatatattatatatttatatattatatatatttatatatattatatatttatatattatatatatttatatatattatatatatttatatatattatatatttatatattatatatatttatatatattatatatttatatattatatatattatatattttatctatatatttatatattaatatatattatatatttatatatattatatatatttatatatatattttttaaataggcagggcacagtggcttatgcctgtaattccagcactttgggaggccaaggcaggcagatcacttgaggtcaggagttcaagaccagcctggccaacatggtgaaacctcatctctactaaaaatactaaaattggctggacatggtggcaggtgcctgtaatctcagctatttgggaggctgaggcagtataat

SEQ ID NO: 1191 - DNA, 548 bp, Human
tatatatatttatatatattatatatttatatattatatatatttatatatattatatatttatatattatatatatttatatatattatatatttatatattatatatatttatatataatatatattatatatttatatattatatatatttatatatattatatatttatatattatatatatttatatatattatatatttatatattatatatatttatatatattatatatttatatattatatatatttatatatattatatatatttatatatattatatatttatatattatatatatttatatatattatatatttatatattatatatattatatattttatctatatatttatatattaatatatattatatatttatatatattatatatatttatatatatattttttaaataggcagggcacagtggcttatgcctgtaattccagcactttgggaggccaaggcaggcagatcacttgaggtcaggagttcaagaccagcctggccaacatggtgaaacctcatctctacta

SEQ ID NO: 1192 - DNA, 546 bp, Human
tatatatatttatatatattatatatttatatattatatatatttatatatattatatatttatatattatatatatttatatatattatatatttatatattatatatatttatatataatatatattatatatttatatattatatatatttatatatattatatatttatatattatatatatttatatatattatatatttatatattatatatatttatatatattatatatttatatattatatatatttatatatattatatatatttatatatattatatatttatatattatatatatttatatatattatatatttatatattatatatattatatattttatctatatatttatatattaatatatattatatatttatatatattatatatatttatatatatattttttaaataggcagggcacagtggcttatgcctgtaattccagcactttgggaggccaaggcaggcagatcacttgaggtcaggagttcaagaccagcctggccaacatggtgaaacctcatctctac

SEQ ID NO: 1193 - DNA, 536 bp, Human
tatatatatttatatatattatatatttatatattatatatatttatatatattatatatttatatattatatatatttatatatattatatatttatatattatatatatttatatataatatatattatatatttatatattatatatatttatatatattatatatttatatattatatatatttatatatattatatatttatatattatatatatttatatatattatatttttatatattatatatatttatatatattatatatatttatatatattatatatttatatattatatatatttatatatattatatatttatatattatatatattatatattttatctatatatttatatattaatatatattatatatttatatatattatatatatttatatatatattttttaaataggcagggcacagtggcttatgcctgtaattccagcactttgggaggccaaggcaggcagatcacttgaggtcaggagttcaagaccagcctggccaacatggtgaaacc

SEQ ID NO: 1194 - DNA, 483 bp, Human
tctcagctactagagaggaggatcacttgagcacaggaggtggagtctgcagtgagccacaatcgtgccactgcactccagcctgggcgacagagtaagaccatatttcaaaaaaaaaatatatatatatatgttttaaaaatattttttaaaatatattttttgagatagggtcttactctattatatattaatatataatatatattatatatttatatattaatatataatatatatttatatataatatatattatatatttatattacatatatttatatgttaatattacatatatttatatatttatatattttatatatttatatattatatatttatatattatatttatatattatatatttatattatatatttatatattatatttatatattatatatttatattatatatttatatattggatttatatattatatatttatatactatatatatttatatatattata

SEQ ID NO: 1195 - DNA, 490 bp, Human
cctgtagtctcagctactagagaggaggatcacttgagcacaggaggtggagtctgcagtgagccacaatcgtgccactgcactccagcctgggcgacagagtaagaccatatttcaaaaaaaaaatatatatatatatgttttaaaaatattttttaaaatatattttttgagatagggtcttactctattatatattaatatataatatatattatatatttatatattaatatataatatatatttatatataatatatattatatatttatattacatatatttatatgttaatattacatatatttatatatttatatattttatatatttatatattatatatttatatattatatttatatattatatatttatattatatatttatatattatatttatatattatatatttatattatatatttatatattggatttatatattatatatttatatactatatatatttatatatattata

SEQ ID NO: 1196 - DNA, 495 bp, Human
ccatccctgtagtctcagctactagagaggaggatcacttgagcacaggaggtggagtctgcagtgagccacaatcgtgccactgcactccagcctgggcgacagagtaagaccatatttcaaaaaaaaaatatatatatatatgttttaaaaatattttttaaaatatattttttgagatagggtcttactctattatatattaatatataatatatattatatatttatatattaatatataatatatatttatatataatatatattatatatttatattacatatatttatatgttwatattacatatatttatatatttatatattttatatatttatatattatatatttatatattatatttatatattatatatttatattatatatttatatattatatttatatattatatatttatattatatatttatatattggatttatatattatatatttatatactatatatatttatatatattata

SEQ ID NO: 1197 - DNA, 498 bp, Human
accccatccctgtagtctcagctactagagaggaggatcacttgagcacaggaggtggagtctgcagtgagccacaatcgtgccactgcactccagcctgggcgacagagtaagaccatatttcaaaaaaaaaatatatatatatatgttttaaaaatattttttaaaatatattttttgagatagggtcttactctattatatattaatatataatatatattatatatttatatattaatatataatatatatttatatataatatatattatatatttatattacatatatttatatrttaatattacatatatttatatatttatatattttatatatttatatattatatatttatatattatatttatatattatatatttatattatatatttatatattatatttatatattatatatttatattatatatttatatattggatttatatattatatatttatatactatatatatttatatatattata

SEQ ID NO: 1198 - DNA, 505 bp, Human
tagcaagaccccatccctgtagtctcagctactagagaggaggatcacttgagcacaggaggtggagtctgcagtgagccacaatcgtgccactgcactccagcctgggcgacagagtaagaccatatttcaaaaaaaaaatatatatatatatgttttaaaaatattttttaaaatatattttttgagatagggtcttactctattatatattaatatataatatatattatatatttatatattaatatataatatatatttatatataatatatattatatatttatattacatataattatatgttaatattacatatatttatatatttatatattttatatatttatatattatatatttatatattatatttatatattatatatttatattatatatttatatattatatttatatattatatatttatattatatatttatatattggatttatatattatatatttatatactatatatatttatatatattata

SEQ ID NO: 1199 - DNA, 511 bp, Human
gcaacatagcaagaccccatccctgtagtctcagctactagagaggaggatcacttgagcacaggaggtggagtctgcagtgagccacaatcgtgccactgcactccagcctgggcgacagagtaagaccatatttcaaaaaaaaaatatatatatatatgttttaaaaatattttttaaaatatattttttgagatagggtcttactctattatatattaatatataatatatattatatatttatatattaatatataatatatatttatatataatatatattatatatttatattacatatatttatatgttaatattacatatatttatatatttatatattttatatatttatatattatatatttatatattatatttatatattatatatttatattatatatttatatattatatttatatattatatatttatattatatatttatatattggatttatatattatatatttatatactatatatatttatatatattata

SEQ ID NO: 1200 - DNA, 514 bp, Human
tgagcaacatagcaagaccccatccctgtagtctcagctactagagaggaggatcacttgagcacaggaggtggagtctgcagtgagccacaatcgtgccactgcactccagcctgggcgacagagtaagaccatatttcaaaaaaaaaatatatatatatatgttttaaaaatattttttaaaatatattttttgagatagggtcttactctattatatattaatatataatatatattatatatttatatattaatatataatatatatttatatataatatatattatatatttataatacatatatttatatgttaatattacatatatttatatatttatatattttatatatttatatattatatatttatatattatatttatatattatatatttatattatatatttatatattatatttatatattatatatttatattatatatttatatattggatttatatattatatatttatatactatatatatttatatatattata

SEQ ID NO: 1201 - DNA, 601 bp, Human
ctgaaaacgtatatctacacagaaacttacatgtgcatggatgtttacggcagctttattcataattgccaaaagctggaagcaaccaagatgtcctctggtactgaaccgataaagtgtggtacaaccagacaatgaaatattcaagccatgaaaagacatggagaagccttcagtacatattagtaaaagaggccaatctgggccaggcgcggtggctcacgcctgtaatcccagcaccttgggaggccgaggtgggcggatcacgaggtcaagagattgagaccatcctggccaacayggtgaaaccccgtctctactaaaaatgcaaaaattagctgggtgtggtggcgtgcacctgtagtcccagctactcaggaggctgaggcaggagaattgcttgaacatgggaggcagaggttgcagtgagccgagattgtgcctctgcactccagcctgggtgacagagcgagactccgtctcaaaaaaaaagaaagaaagaaaatcctacatactatgtgattccaactatatgacattctgggaaaggcaaactatggagatagtagaaggatcggtggttgccaggagttagagagga

SEQ ID NO: 1202 - DNA, 601 bp, Human
aaagatggtgctgggctgggtgccgtgctcatgcccgtaatctcagcacttttggacactgaggtaggaggatcacttgtgtacagaagttccagaccagcctgggcaacatagtgagacgccatctctagaaaaaaataatagattggccaggcgcagtggctcacgcctgtaatcctaggactctgggaggccaaggcgggtggatcacctgaggccaggagttcgagaccagcctggccaacacaacgaaaccccacctctactaaaaatacaaaaaaaaaattagccgggtatggtrgcacacacttctaattccagttactcagaagactgaggctagagaattgcttgaactcaggaggcagagtttgcagtgagctgagattatgccacttgcactccagcctgggtgacatagcaagactctgtctcaaaaaaaaaaaagaaaaaattcaaaaatttgctgggcactattggtggtgcactcctgtagtcccagctactggagaggctgaggcgggagtattgcttgagctaggaagtttgaggctgcagcaagatgtgattgtgtcactgcactcagcctgggtgacagagt

SEQ ID NO: 1203 - DNA, 601 bp, Human
aaggcagtttcccttctctctctctctctctctctcgcctgctgccatgtaagacaggtctgcttccccttccatcatgattgtaagtttcctgaggcctctccagccatggggaactgtaagtcaattagacttcttttctttataaattacccagtcttggggagtattctttacagcagtgtgaaaacagactaatacacagggtttcactgtgttgcccaggctggtttcaagtgatcctcccgcctcggcttccagagtagctggattgcaggtgtgagccactgcactcagctaktctatttttaaaaagaaaatgctgctcactaaacagacatcaccacccactaactggtcatgacctgcagttgagaaaatattgagataaaggattggattggaatgacacttcccaggttaagattctgcatttcagtctttcaaagatgtttctttgtaggaaacatcacagtaaagctctgcacctgagaaccaggtagggctcaaccatctgtttcacagcagaggtataggaacgctttctacacgcttcagacatcacagattggttctagtccctgggaacctgttgtcctcc

SEQ ID NO: 1204 - DNA, 601 bp, Human
ttctcaagcttttttgactctcacccacagtaaaaaatacagaaatacattttccactgcaacctggttctcgtgtgtgtgtgtgtgtgtgtgtgtgtgtgtgtgtatgtgaaacaaaagtgggcaatacttatctttactacacgtaacactgcctcttccattttatttattgatttatatatatatttatttatctttgagatggggatatggtttggctctgtgtcctcacccaaatctcatctcaaattgtaatccccatgtgtcaagggaggacctgatgggaggtgattggatyataagggcgagttctcccatgtttttcttgtgataccaagttctcatgagatcggatggttttataaggcagtttcccttctctctctctctctctctctcgcctgctgccatgtaagacaggtctgcttccccttccatcatgattgtaagtttcctgaggcctctccagccatggggaactgtaagtcaattagacttcttttctttataaattacccagtcttggggagtattctttacagcagtgtgaaaacagactaatacacagggtttcactgtgttgcccaggctggtttca

SEQ ID NO: 1205 - DNA, 601 bp, Human
aacagagtgggattaggaaaaaacacctcccagtttgttagatgagaggactcagcgagtcagcacccgctcagcaggtgggcatttcaggaatagaactcagtacgcccttggcaaactttaaattgccctataaaacttaaaatgtggcactgttagcacctttctggtagtggaattcatacattagattgtttctcaagcttttttgactctcacccacagtaaaaaatacagaaatacattttccactgcaacctggttctcgtgtgtgtgtgtgtgtgtgtgtgtgtgtgtgtgtatgtgaaacaaaagtgggcaatacttatctttactacacgtaacactgcctcttccattttatttattgatttatatatatatttatttatctttgagatggggatatggtttggctctgtgtcctcacccaaatctcatctcaaattgtaatccccatgtgtcaagggaggacctgatgggaggtgattggatcataagggcgagttctcccatgtttttcttgtgataccaagttctcatgagatcggatggttttataaggcagtttcccttctctctctctctctctctctcgcct

SEQ ID NO: 1206 - DNA, 601 bp, Human
caagatggcagagaccggccgggcatggtggctcacgcctgtaatcccagcatttcgggaggctgaggtcaggagtttgagactagcttggccaacatagtgaaaccccatctctaccaaaaatacaaaaattagctgggtgtggtggcgggcagctgtaatcccagctactcaggaggctgaggtaggagaatcagttgaacccgggaggcagaggttgcagtgagccaagatcatgccacagcactccagcctgggtgacaagagggaaactccatctcaaaaaaaaaaaaaaaaaaaagatggcagagacccagccaggtgctctcagggaaagccgagcactaagtgaagtttgccatggggctcaccatcctccctttggcatgacttagtctctgtttgggaaatgtcttctcatctttttttcacgtctctgttactgccaattaatcctagctgaggggtttatggacagccagccaaattatccatttgtccctatccctgcgtttggaaggaacaaatgagagttccttggcaatgttgggaaagtgactggagggaggcagtgaggcacctgggaggggctccctcaagg

SEQ ID NO: 1207 - DNA, 601 bp, Human
tgctggaaacaattctgtattgttaatggtcaatagaaaagtgattggacctgcttactggtggcaacttttaggaatgtatttttcaaaatgttgagcccactgcagagaaaacccacaggtcagggcaagatggcagagaccggccgggcatggtggctcacgcctgtaatcccagcatttcgggaggctgaggtcaggagtttgagactagcttggccaacatagtgaaaccccatctctaccaaaaatacaaaaattagctgggtgtggtggcgggcagctgtaatcccagctactsaggaggctgaggtaggagaatcagttgaacccgggaggcagaggttgcagtgagccaagatcatgccacagcactccagcctgggtgacaagagggaaactccatctcaaaaaaaaaaaaaaaaaaaagatggcagagacccagccaggtgctctcagggaaagccgagcactaagtgaagtttgccatggggctcaccatcctccctttggcatgacttagtctctgtttgggaaatgtcttctcatctttttttcacgtctctgttactgccaattaatcctagctgaggggtttatg

SEQ ID NO: 1208 - DNA, 601 bp, Human
cacatatattgccctatttaattctcctaaaagcacatccagaggctggggatggagaggaagtttcactagtccaagtatcaggtaccaaatcctgagtcaaatggaggctcagggacgtgggtctctgaagggaggctctcaggaacagagtttggagtgagcagaggttggagctgctgttgatggcggggtatttgatagaactgagataggagggtacctgaggccatgttttcctgtttggcaattctacccacagatgtctctgctcagtatttgaaaagagacatcacagttyattaatatcgattcttcctcatttgcagagcaaagaggggcagtctttaaagcagctcttagcatgtctaggtgggaagagggagcaacacctcacaggcccagggcaaagggctgcagaggaaaggaaggcctcctgggagctgaagtgggaggctgtgtcctcaccacttaacaagagccacttagcagcaagagcatcttggtgaaggatattaataaagggtcaaacctcaggaggtttgtgaagagatggggttacctgtacgttggtggaaagcaatctctatttttgtcttta

SEQ ID NO: 1209 - DNA, 601 bp, Human
tgtgtgtgtgtgtgtatgtgtatatatatgtgtgtgtgtgggtgtgtgtgtggcctgggtgtgtgtgtgtgtgtgtatagggcatgtgtatgtgtatgtatatatatggcatgtgtgtatgtgtgtgtatgtgtgtatggcccaggacccctagcccccagctttaccttataggaacagtaaataaaccaatgcagagatagtttcatacacctttaagaacaagttatatgtctctataagcatttaaaatgtcaacacatattacggaatatctgcatttctgggatttctgtaatgyctggactacttctgaatccccagtatttaaacttgtaaatattcccatcatacttgaatctggtggagggaaaacttactctattttatagaatgacgtgttgcctgatgtcaattaaaaaaacataggcagaatttaattttgcagcttccaaagtattttcacatatattgccctatttaattctcctaaaagcacatccagaggctggggatggagaggaagtttcactagtccaagtatcaggtaccaaatcctgagtcaaatggaggctcagggacgtgggtctctgaagggagg

SEQ ID NO: 1210 - DNA, 601 bp, Human
gcctgagtctagacccactcacgtttctgctttttgaggagggtctgtttcataaaaggcaaggcagctgggtgtgatggctcgtgcctgtaatttcagcacttggggaggctaagtggggaggatagattacttggggtcaggagtttgagaccagcctgggcaacatagtggaaccgtttccactaaaaatatgtatatgtgtgtgtgtgtgtgcgcgcgcatgatatatatggcctgtgtgtatttacatatggtgtgtatgtctgtgtgtgtatggcctctgtgtgtgtgtgtgtaygtgtatatggacatggcctggtgtgtgtgtgtgtgtgtatatatatatggcatgtgtgtgtacatatatatatatatggcctctgtgtgtgtgtgtgtgtgtatgtgtatatatatgtgtgtgtgtgggtgtgtgtgtggcctgggtgtgtgtgtgtgtgtgtatagggcatgtgtatgtgtatgtatatatatggcatgtgtgtatgtgtgtgtatgtgtgtatggcccaggacccctagcccccagctttaccttataggaacagtaaataaaccaatgcagagatagtttcatacac

SEQ ID NO: 1211 - DNA, 601 bp, Human; identical to SEQ ID NO: 523

SEQ ID NO: 1212 - DNA, 601 bp, Human; identical to SEQ ID NO: 524

SEQ ID NO: 1213 - DNA, 601 bp, Human; identical to SEQ ID NO: 525

SEQ ID NO: 1214 - DNA, 601 bp, Human; identical to SEQ ID NO: 526

SEQ ID NO: 1215 - DNA, 601 bp, Human; identical to SEQ ID NO: 527

SEQ ID NO: 1216 - DNA, 601 bp, Human; identical to SEQ ID NO: 528

SEQ ID NO: 1217 - DNA, 601 bp, Human; identical to SEQ ID NO: 529

SEQ ID NO: 1218 - DNA, 601 bp, Human; identical to SEQ ID NO: 530

SEQ ID NO: 1219 - DNA, 601 bp, Human
atacaggtcttgggcaggattgcagacctctgcagatggtaccaaagtaaagggggagatggtagctgaataatctcttatcatccctaaagtgcaaagtgaaatgagagtggatttttccttccaaatccacttggagtgagtcccgaaagactcacttttgcggcaatccccacaatgacatcactggagcggaggttatataatttaaagcaaccacatctccacagcacttcccagaagagaaaactcctccaaaagcagctctcactatcagaaaacccaactacagttgtgaacrccttcattttctgcctgagtaagtaaatgaccaccttttttttttcttttatgagagtacaatatgagaggaaatctgtgtctcttagaaaaacaaaaaacttccttttacacctacctattggcaaaattttccacttctgtgagggtactttttaaaaataattctaaatcaatttaagagacttttatttcatgcctagtttgggtcttaattgcttttccagaacaggaggaggagggaaaggttttagaactcgtaggaaggttccagtagctccttatatcaaagtcaggtgaa

SEQ ID NO: 1220 - DNA, 601 bp, Human
catcagagatagctaggagagggatggtcaggccatgtgtgtgcacactgccggggcaccccaatagtcaaaaattatttcccccaaaaattagtatttacaggtagaaagagagaggaaagaaggaaggaaggaaagaaggaagggaaggaaggaaggaaggaaagcaggatgggagggagggaagaagggagggaggaagggagggatggaggaaggaaggaaggaaggagggaaggagggtagggagggaaggagagaaggagggaatgaagggaaggaaggaaggaaggggaaaaagtccaacaaaatggttatattatattgatggtgttataaagtagttctagataaaaactattttcaaaaaagtctttaaatatatatgcatacacctatgaatattaaagcaaaagaaaacatgtttatgttaatcaactgaacatttaaaaataagataagcaaaataattgttcttgttgtatattcacatgctacagtttcttgtacctgactgataccctgtcactggcatttttcacaagaatgtattttcttcagtggggtcttgttatttttaatttttccatataattgcctg

SEQ ID NO: 1221 - DNA, 601 bp, Human
agctaggagagggatggtcaggccatgtgtgtgcacactgccggggcaccccaatagtcaaaaattatttcccccaaaaattagtatttacaggtagaaagagagaggaaagaaggaaggaaggaaagaaggaagggaaggaaggaaggaaggaaagcaggatgggagggagggaagaagggagggaggaagggagggatggaggaaggaaggaaggaaggagggaaggagggtagggagggaaggagagaaggagggaatgaagggaaggaaggaaggaaggggaaaaaatccaacaaartggttatattatattgatggtgttataaagtagttctagataaaaactattttcaaaaaagtctttaaatatatatgcatacacctatgaatattaaagcaaaagaaaacatgtttatgttaatcaactgaacatttaaaaataagataagcaaaataattgttcttgttgtatattcacatgctacagtttcttgtacctgactgataccctgtcactggcatttttcacaagaatgtattttcttcagtggggtcttgttatttttaatttttccatataattgcctgaaatcttttt

SEQ ID NO: 1222 - DNA, 601 bp, Human
aagtccaattctttgcatatggaattgcataaatattttagcccagatattttcacaggtgctgtctttgtgccttagtttggaatgtagtggtgcgatcttggctcgccacaacctccgcttcccaggttcaagcaattctcctgcctcagcctcctgtgtagctgggattacaggcgcctgccaccatgcccggctaatttttgtgttttcagtagagacaaagtttcaccatgttggccaggttggtcttgaactcctgacctcatgtgatccacctgcctcagcctcccaaagtgcwgggattacaggcatgagccacaccgtgcccagcccacacgtatttttttttaaccagattaaacctttcaaataagttgtacctacttataagttttgaatgttttgtcagattcagatactgcaaaaaaaaaaaaaatcattggctttctcaatttcatctcatttcatacagaacatgaatttatccaattaaaaagattcttcccacaagctgaaatgttccagagctcattttagaatttcaaaattaactcttgtacagcatttgattttgatcattttctgatacattttataa

SEQ ID NO: 1223 - DNA, 601 bp, Human
ccccatgtgatgtccaatttatatctcaaccttaacaattccaaagttgaactcctgttcttccccaccccccacaaaaaaaactgcttcatcttcattctgtcaccttcatttcagctgatgacaacttcatacttcccagtgttcagtccaaaaaccttggcattgtccgatttctcctttctcccacccagatccaactgaaaatcacggtgttactacctccaaaacacctctagagtttgatcacttgatcacttctcaccacctgccctgctactctccccagctgtcacccgcyagcatgtttatttagtgtgtgtattgtttatcaacttcttcctcctgctaggcttatacgcacactgagagcagggatttttgcctgctgtattcactgctttgtcctaaatacctagaacagtgcctggcacatagtacattctcagtaaatacttgttcagcaaataaataactggaggaaccagtgaattataccccggtgtgaataactccatgtgagtgacatgacagaatgtcagagctagaagggcctcttgaggacatcatgtcttccttagatgaggaaagtcaggctcag

SEQ ID NO: 1224 - DNA, 601 bp, Human
tgtattgtttatcaacttcttcctcctgctaggcttatacgcacactgagagcagggatttttgcctgctgtattcactgctttgtcctaaatacctagaacagtgcctggcacatagtacattctcagtaaatacttgttcagcaaataaataactggaggaaccagtgaattataccccggtgtgaataactccatgtgagtgacatgacagaatgtcagagctagaagggcctcttgaggacatcatgtcttccttagatgaggaaagtcaggctcagagacatgaactgactctccygaggttacacagccaaatatgctcttccaaggttaattctctgctacacaatagcttttgttggtatctgtgaggctttgcggggttgaaggaatctcaggtgtcacccattaataacaatcatgacagtgacaactaatgtttgccacgtgcttacaataagtcaggaaccctgccaagcaccgggcgtatattaacctatccaagctggggaagaatgtttaggctctgaagattgtctggagccgcataaatcccgcagtgtaggcagctgctcattctgcagatagtattctgtgg

SEQ ID NO: 1225 - DNA, 601 bp, Human
gtaaatacttgttcagcaaataaataactggaggaaccagtgaattataccccggtgtgaataactccatgtgagtgacatgacagaatgtcagagctagaagggcctcttgaggacatcatgtcttccttagatgaggaaagtcaggctcagagacatgaactgactctcctgaggttacacagccaaatatgctcttccaaggttaattctctgctacacaatagcttttgttggtatctgtgaggctttgcggggttgaaggaatctcaggtgtcacccattaataacaatcatgacrgtgacaactaatgtttgccacgtgcttacaataagtcaggaaccctgccaagcaccgggcgtatattaacctatccaagctggggaagaatgtttaggctctgaagattgtctggagccgcataaatcccgcagtgtaggcagctgctcattctgcagatagtattctgtggatccctgagttggctgtggccggttttgccagcaggaggccacgaagccatgagcacaggatgggatctaccccttgtgggatcgcagagggctgggagatgcagtcctccctatggaaagagacaga

SEQ ID NO: 1226 - DNA, 601 bp, Human
ttgaggacatcatgtcttccttagatgaggaaagtcaggctcagagacatgaactgactctcctgaggttacacagccaaatatgctcttccaaggttaattctctgctacacaatagcttttgttggtatctgtgaggctttgcggggttgaaggaatctcaggtgtcacccattaataacaatcatgacagtgacaactaatgtttgccacgtgcttacaataagtcaggaaccctgccaagcaccgggcgtatattaacctatccaagctggggaagaatgtttaggctctgaagatwgtctggagccgcataaatcccgcagtgtaggcagctgctcattctgcagatagtattctgtggatccctgagttggctgtggccggttttgccagcaggaggccacgaagccatgagcacaggatgggatctaccccttgtgggatcgcagagggctgggagatgcagtcctccctatggaaagagacagagctttctatccctctcccggtgaaactcagcatgggagcatgggaggcaggtcagctgcgtggctatgaacatgagctatggggtgcatgcagaccaaggttcatagtg

SEQ ID NO: 1227 - DNA, 601 bp, Human
ctgcagatagtattctgtggatccctgagttggctgtggccggttttgccagcaggaggccacgaagccatgagcacaggatgggatctaccccttgtgggatcgcagagggctgggagatgcagtcctccctatggaaagagacagagctttctatccctctcccggtgaaactcagcatgggagcatgggaggcaggtcagctgcgtggctatgaacatgagctatggggtgcatgcagaccaaggttcatagtgtacactgtacccaccagctgtagctcctccagcaagcgtgggargccagtcagctgcatggctgtgagcacggcctctggggtccatgcagaccaaggttcctggcgtagcactgtaaccaccacctaggtcttctccgacaagctggttaacttctctgagcctggctttgtcattcatcgcgtggggacaggtgcagcagaagagagcagacagaagcacaggatctcaatcaggctcttgaatcagactgcctgggtttgaatccaggccctactgaccagctgtgtgacctcagacaggcgactccgggtctcagcactcaattttctaattggccaact

SEQ ID NO: 1228 - DNA, 601 bp, Human
gagagcagacagaagcacaggatctcaatcaggctcttgaatcagactgcctgggtttgaatccaggccctactgaccagctgtgtgacctcagacaggcgactccgggtctcagcactcaattttctaattggccaactggagatgacaatggcccctaccttgaatggctgccaggaagattaaatgagaaaatacttaaatgtgaaacacttagaatggcgcctggaacacagaccattaataccatctaacagatgttagttgttatccttatttattactcatgctttcctttctmttttttcttttctctctctctctctccttttttttttttttttttttgttgttgttgttgttgagacagggtctcagtccgtcggcccagactgaagtgcagtggcacaatcatagctcgctgcagcctcgaccttccaggcttaaacgattctcccacctcagcctctcgagttgctgggaccacaggtatgcaccaccatgcccagctaatttttgtattttttgtaaagacaggatttcaccatgttgcccaggctggtcttgaactcctgggttcatctgatccatctgccttggc

SEQ ID NO: 1229 - DNA, 601 bp, Human
atcaggctcttgaatcagactgcctgggtttgaatccaggccctactgaccagctgtgtgacctcagacaggcgactccgggtctcagcactcaattttctaattggccaactggagatgacaatggcccctaccttgaatggctgccaggaagattaaatgagaaaatacttaaatgtgaaacacttagaatggcgcctggaacacagaccattaataccatctaacagatgttagttgttatccttatttattactcatgctttcctttctcttttttcttttctctctctctctctccttttttttttttttttttttgttgttgttgttgttgagacagggtctcagtccgtcggcccagactgaagtgcagtggcacaatcatagctcgctgcagcctcgaccttccaggcttaaacgattctcccacctcagcctctcgagttgctgggaccacaggtatgcaccaccatgcccagctaatttttgtattttttgtaaagacaggatttcaccatgttgcccaggctggtcttgaactcctgggttcatctgatccatctgccttggcctcccaaagtactgagattacaggtgt

SEQ ID NO: 1230 - DNA, 601 bp, Human
caggctcttgaatcagactgcctgggtttgaatccaggccctactgaccagctgtgtgacctcagacaggcgactccgggtctcagcactcaattttctaattggccaactggagatgacaatggcccctaccttgaatggctgccaggaagattaaatgagaaaatacttaaatgtgaaacacttagaatggcgcctggaacacagaccattaataccatctaacagatgttagttgttatccttatttattactcatgctttcctttctcttttttcttttctctctctctctctcctyttttttttttttttttttgttgttgttgttgttgagacagggtctcagtccgtcggcccagactgaagtgcagtggcacaatcatagctcgctgcagcctcgaccttccaggcttaaacgattctcccacctcagcctctcgagttgctgggaccacaggtatgcaccaccatgcccagctaatttttgtattttttgtaaagacaggatttcaccatgttgcccaggctggtcttgaactcctgggttcatctgatccatctgccttggcctcccaaagtactgagattacaggtgtga

SEQ ID NO: 1231 - DNA, 601 bp, Human
aggctcttgaatcagactgcctgggtttgaatccaggccctactgaccagctgtgtgacctcagacaggcgactccgggtctcagcactcaattttctaattggccaactggagatgacaatggcccctaccttgaatggctgccaggaagattaaatgagaaaatacttaaatgtgaaacacttagaatggcgcctggaacacagaccattaataccatctaacagatgttagttgttatccttatttattactcatgctttcctttctcttttttcttttctctctctctctctccttytttttttttttttttttgttgttgttgttgttgagacagggtctcagtccgtcggcccagactgaagtgcagtggcacaatcatagctcgctgcagcctcgaccttccaggcttaaacgattctcccacctcagcctctcgagttgctgggaccacaggtatgcaccaccatgcccagctaatttttgtattttttgtaaagacaggatttcaccatgttgcccaggctggtcttgaactcctgggttcatctgatccatctgccttggcctcccaaagtactgagattacaggtgtgaa

SEQ ID NO: 1232 - DNA, 601 bp, Human
tgaccagctgtgtgacctcagacaggcgactccgggtctcagcactcaattttctaattggccaactggagatgacaatggcccctaccttgaatggctgccaggaagattaaatgagaaaatacttaaatgtgaaacacttagaatggcgcctggaacacagaccattaataccatctaacagatgttagttgttatccttatttattactcatgctttcctttctcttttttcttttctctctctctctctccttttttttttttttttttttgttgttgttgttgttgagacagggtytcagtccgtcggcccagactgaagtgcagtggcacaatcatagctcgctgcagcctcgaccttccaggcttaaacgattctcccacctcagcctctcgagttgctgggaccacaggtatgcaccaccatgcccagctaatttttgtattttttgtaaagacaggatttcaccatgttgcccaggctggtcttgaactcctgggttcatctgatccatctgccttggcctcccaaagtactgagattacaggtgtgaaccaccacacccggccaatactcatgtttttcaagcctgtaaga

SEQ ID NO: 1233 - DNA, 601 bp, Human
tgaggctggggctgctctgtcctgcatatctccagtgcctggcaaggggctggcaagaggtagaggctcattaaatgcctgttaaaaccctaatagtaataataataatggtacagttgttactaagactaatcactaccttccaaagtctttcctctatgcaaggcacggagctaagcaccctgtagatcctgacaacagccctcccgtgatcccacaagagagacacgattctctccaatgtttaaaaaggaaagtaaaagtcaatggttctaagtagctcacactgagtgattgtacygggatttggactcaggcaccatcccttaaaccagaggtcagcaaacttttccccctcaggaacagatggtaaatatcttcagctttgcaagccagacagtctctgttacaagcgctcgactcccccttgtagcatgaacacagctgtagataatacgtccaggaatgggtgtggctctgtgccaataaaactttattgtccaaaaacaggtgacaggttggtttggctcataggctgtagtctgccacttcctgttttattctaccttctgttcatttcaggtcactgtgcatggcatca

SEQ ID NO: 1234 - DNA, 601 bp, Human
gctcgactcccccttgtagcatgaacacagctgtagataatacgtccaggaatgggtgtggctctgtgccaataaaactttattgtccaaaaacaggtgacaggttggtttggctcataggctgtagtctgccacttcctgttttattctaccttctgttcatttcaggtcactgtgcatggcatcatcctggccccctctagagctccaatcctccaaccagagccagctcttccctcaaaatgctacggcctgtgacaatgctccagaagcctgggacctgctgcacagagtgctgccracatttatcatctccatctgtttcttcggcctcctagggaacctttttgtcctgttggtcttcctcctgccccggcggcaactgaacgtggcagaaatctacctggccaacctggcagcctctgatctggtgtttgtcttgggcttgcccttctgggcagagaatatctggaaccagtttaactggcctttcggagccctcctctgccgtgtcatcaacggggtcatcaaggccaatttgttcatcagcatcttcctggtggtggccatcagccaggaccgctaccgcgtgctggtgcac

SEQ ID NO: 1235 - DNA, 601 bp, Human
gggctttattccagaatgtatatggaatgatctacacaagatttggaggggaaaatgactataactgctgtcttgtatctatctgtcttttgaaatttctattttatgaaggcatatcatctgttagtatcaaactgcatgtgcatgaatttaaaaatacagccgggcgtggtggctcacgcctgtaatcccaggcctgtaatcccagcactttgggaggccgaggcgggcagatcatctgaggtcgggagttcgagaccagcctgaccaacatggagaaaccccgtctctactaaaactmcaaaaaaaaaaaaaaaaaaaaaaaaaacattagctgggtgtggtggcacatgcctgtaattccagctactcgggaggctgaggcagaagaaacgcttgaacccgggaggcagaggttgcagggagttgagatcgcgccattgcactccagcctgggcaacaaaagcgaaactccgtctcaaaaaataaataaataaaaataaaaaaataaaaatacagatacaccactgtgaaagaggtgttccaacattaattactgacgaggtagacagtggaaaacttggagaacactccatgaaga

SEQ ID NO: 1236 - DNA, 601 bp, Human
taagccaagatacttgcctgggtgacagagtgagacctcgtctcaaaaaaagacaaaaaacaaaaaactatgctgtctgcaccacaaaggggctgagaaagcctgcagatttctgatttttccttttctggaaggtagagactggccagaaaagtgatgagtgatgggcataggcaaggctagttacaagttcttcacgaagggtggggtgagacatctggggcagggctcacccttgcgtgctgcccaggagagatcgtgggcgaacccctggcttgtaggcaaggtgattccatctgtyccctacttcctattcagctaagctcattactgtgagttacagaggagcacaatggaacacggggaagttagttaagtcagttcccatttcctaggagacaaagaggaacatagcagaaccaaggctttggagccagacacacctggttttcagatcttgtgtgaaaggcaagcgatatgacctccccaggcctctaacatcatgcacaaaaaggctgtgcttgcaggtcaaatcagcagtctccaaagggaagggctttattccagaatgtatatggaatgatctacacaagatttggag

SEQ ID NO: 1237 - DNA, 601 bp, Human
atactgccagaatgccagcttttggataaaggccaaggcccaggtacaagtcacccacagcccaggtaaggcatcatgggagtccaaggaagcaagaaatatttatggagcatctatggggacagagacgtacattcttttctgaattcctagacactgtaatgatgaaaactgggcaactaagctaagctgggattcaaaaccacatatgcaaacatctatgtttggccgggtgcggtagctcacgcctgtaatcccaacactttgggaggctgaagtgggcggatcacctgagctcaasagttcgagaccagcctgggcaacatggcgaaaccctgtctctaccaaaaatacaaaaatttagctgggcacggtgacgcatgtctgtggttccagctactcaagaggctgaggtgacagaatcgcttgagcctgggaggtagaggttgcagtaagccaagatacttgcctgggtgacagagtgagacctcgtctcaaaaaaagacaaaaaacaaaaaactatgctgtctgcaccacaaaggggctgagaaagcctgcagatttctgatttttccttttctggaaggtagagactggccag

SEQ ID NO: 1238 - DNA, 601 bp, Human
ttctctaatttagggcacggggccagtctcaccacatccactgggggtagccaagtctctatttactgagaaggaaaccaaggctccaaggaaagccacttcttcaaggtcagagtttagtgggaacatctagtgttttgtttccattcacagtagagtttcagttgtcaagttacgtctaatccaactttcaggctcctatggcatggcaagtcctgtgtctggggattcctgctcatttggggtgggtggaggatggcacagacaggcatgtggagaagaaagcatctttaaaaaaaaacacagctaggccaggcgcggtggctcacacctgtaatcccagcactttgggaggccgaggtgggcggatcacctgaggtctggagttcgagaccagcttgaccaacatgaagaaaccccatctctactaaaaaaaaatacaaaaaaattagccgggcatggtggcacatgcctgtaatcccagctactcgggaggctgaggcaggagaaccactagaacctgggaggcgaaggttgtggtgagctgagattgtgtcatggcactccagcctgggcaacaagagcgaaactccgtctcaaa

SEQ ID NO: 1239 - DNA, 601 bp, Human
acaagctgattacgggggatttgaggctggcccagctccggggcaaatagggtcgaatccctggatggctcggtactagacaaggatcatcttggggctgtttacatcatttgtacacccagactggccttacaaagggtctttccacttaaaatagccacttctctaatttagggcacggggccagtctcaccacatccactgggggtagccaagtctctatttactgagaaggaaaccaaggctccaaggaaagccacttcttcaaggtcagagtttagtgggaacatctagtgttttrtttccattcacagtagagtttcagttgtcaagttacgtctaatccaactttcaggctcctatggcatggcaagtcctgtgtctggggattcctgctcatttggggtgggtggaggatggcacagacaggcatgtggagaagaaagcatctttaaaaaaaaacacagctaggccaggcgcggtggctcacacctgtaatcccagcactttgggaggccgaggtgggcggatcacctgaggtctggagttcgagaccagcttgaccaacatgaagaaaccccatctctactaaaaaaaaata

SEQ ID NO: 1240 - DNA, 601 bp, Human
aggcactgggcaaagctgagctccttgaagtcacaagctgattacgggggatttgaggctggcccagctccggggcaaatagggtcgaatccctggatggctcggtactagacaaggatcatcttggggctgtttacatcatttgtacacccagactggccttacaaagggtctttccacttaaaatagccacttctctaatttagggcacggggccagtctcaccacatccactgggggtagccaagtctctatttactgagaaggaaaccaaggctccaaggaaagccacttcttcaasgtcagagtttagtgggaacatctagtgttttgtttccattcacagtagagtttcagttgtcaagttacgtctaatccaactttcaggctcctatggcatggcaagtcctgtgtctggggattcctgctcatttggggtgggtggaggatggcacagacaggcatgtggagaagaaagcatctttaaaaaaaaacacagctaggccaggcgcggtggctcacacctgtaatcccagcactttgggaggccgaggtgggcggatcacctgaggtctggagttcgagaccagcttgaccaaca

SEQ ID NO: 1241 - DNA, 601 bp, Human
ccctcccgtggagagaggtaacaattggaggcttgttagggtagccagggctgggcctgcaggcctggacacagcctctctgagcccatgaatctggtcaggaggcctcccagcctccgccatcatggggacgtcggttaccagactgcagactgagtgagcggctttatcacctttatgcccaggagtgaggtgggggaaggggtgaggttgcaggccccaagccaacactgcacactttcctctttgttccaggcctccccagctttgccagtcttggggaagcagggagctggatggmtgtacccttggtacttgagcagagctctgggccgacaccccgtgaccaggaggcactgggcaaagctgagctccttgaagtcacaagctgattacgggggatttgaggctggcccagctccggggcaaatagggtcgaatccctggatggctcggtactagacaaggatcatcttggggctgtttacatcatttgtacacccagactggccttacaaagggtctttccacttaaaatagccacttctctaatttagggcacggggccagtctcaccacatccactgggggtagccaagtc

SEQ ID NO: 1242 - DNA, 601 bp, Human
aagagaggagatgctgtcttctttctgcccaggttcaaggcctgggagccctgctcagttactgcaaaaccctaatgtttatgcatcagctactgccaggcctggtggctggaagacagagcctcaggctccagtccacccctcccgtggagagaggtaacaattggaggcttgttagggtagccagggctgggcctgcaggcctggacacagcctctctgagcccatgaatctggtcaggaggcctcccagcctccgccatcatggggacgtcggttaccagactgcagactgagtgagyggctttatcacctttatgcccaggagtgaggtgggggaaggggtgaggttgcaggccccaagccaacactgcacactttcctctttgttccaggcctccccagctttgccagtcttggggaagcagggagctggatggctgtacccttggtacttgagcagagctctgggccgacaccccgtgaccaggaggcactgggcaaagctgagctccttgaagtcacaagctgattacgggggatttgaggctggcccagctccggggcaaatagggtcgaatccctggatggctcggtactag

SEQ ID NO: 1243 - DNA, 601 bp, Human
ggaagtgtcagaccacatggtaaccccacaatgcaacactgtggttagagactttatatagctgggagatggagggctgccccacagatgtatgaacaggtccaatcttccataaataaacctacagaagagagaaaattacactggaattcatccttagacgcagagtaccctagatgggagggggcatcctcactggtcagggggccaggatgggtgatgagggggcccagatatccacagcatggggcaggcaggggcaaggatggggtcaacagatgatgggcatttgcactaggayactgcattcacaagaccaactactgaagggatatgtgtctcaggctgttcattctggaataagcaggggtgatctttatatcacattctgtggctggtgggctcaaaggctactttgtggagagaatgagaccatgcagtgaaaatgaggatcaggatcaagcccacaaatagcccgggcttctaggcagcactgtgtcccccacagtgctgatgacatagctggctgccgggccactcaggcctacactcagcctagcgcttggctggaggagattcccgtagaggctgatgcagtcga

SEQ ID NO: 1244 - DNA, 601 bp, Human
tgaatgcatgctcccaacactcttctagtcaatggaaattcagcgataaaactataccaaatccctgcctatggaacttgataggttagttgaaggctggggcagaaaataaatacatgtaatacatcaggtggtgagtggtatgaagaaggtgatggggctgctatttcttaatcatggtgggacatgcctgtaatgaagtattatgcagctattggaaagaatgaaacacatctgtgtttcacataacatgtatgtgttatgaagagtaccagggtagattgttcaggggggaaaaaaagcaataggatgtacatattgtgtaaggaacagggagttagtgaacttgtatagtggcacttggttgtatgtgcagagagaaacactgccagtatttacctctaagggttgggttggtgaacagaatgggttgcaaagaactatgcagaaagtgggatccaactacacaaatattctatttataggcatgtatctacacatgcacaaagagaagtctttagggtaaacaccaaactgtcaaaactagaagacactctttcatttattatgcttctctgtagttggctctgtaacttctgaa

SEQ ID NO: 1245 - DNA, 601 bp, Human
acacatttggtggtgagatgggcaataattcaactaagagaacattaatttggtaagattgggcacatgcaaagttcactgtcactctcagcagacacatttaagtcccagctcctccacttgtgtgaccttaaaaaagtcctttcctggctgggcatggtggctcacgcctgtaattccagcactttgggaggctgaggtgggcggatcacctgaggtcaggagttcaagaccagcctgaccaacatggtgaaaccccgtctctactaaaaatacgaaaaattagctgggcgtggggggygcgcgcctgtaatcccaactactcgggaggctgaggcaggagaatcacttgaacccgggaggcagaggttgcagtgagccgagatcgcgccattgcactccagcttgggcaacaagagtgaaactccgtctcaaaaaaaagtctcttcctctaagcttcagttaattctccataagagaggatcttctatgaataaatgatattgctaaggaaagattatgcctgaatgcatgctcccaacactcttctagtcaatggaaattcagcgataaaactataccaaatccctgcctatggaac

SEQ ID NO: 1246 - DNA, 601 bp, Human
aattatattaaattcacatttcagtgaccatgaataaagttttattggaacacagccacactcatttgtctacagctgcttttgtactgcaacagcaaagctgagtggcaggccgagaactacatgtccaacaaagctgacaatatttacgctctatctggccctttagaaaaaagttgatcggcctctgctttaagccccacgtcccctgagctagctgcccagcattctcaaagccttccaggcaaaaccacatcctccctaaataaccgaaaaggtatgcatcctattatggaatgtyaaatgtaaatggctccttggccatgtgtgggtgtggggccaggatctggaccctggggaaactgacacccctgagaagatacacatttggtggtgagatgggcaataattcaactaagagaacattaatttggtaagattgggcacatgcaaagttcactgtcactctcagcagacacatttaagtcccagctcctccacttgtgtgaccttaaaaaagtcctttcctggctgggcatggtggctcacgcctgtaattccagcactttgggaggctgaggtgggcggatcacctgaggtc

SEQ ID NO: 1247 - DNA, 601 bp, Human
caaaacctgaccttagggtgacctcaagcattaagtgctcctgaagccacttcctttaagccttccaatgatatcaagacccttgcatgactgaacctccagacacccctggttgccctcgagtcagaaggcactcgccagtcttcaaagtagaactgagaggagggggctggtgcatttagcagcagcagcagcagcgagctgaggcaccctgccagaggctgctcacacattctgattaaccaccatgaacaagcttttggggagcgattactcccttttcacagatgagaaatgagakagagggaaaagcgcagaaccaggggactctaggcttcagggaagtttccaattgggggtctctgatgccaaattctatggctttcctgcttaggtcctcccccttgtttccgggtactggtccctgaaggaaacaaggtttctacctggtgctttctatgtaggtcaaattccataaaagcaactctctgagccttgcccactctgagctgagacagcccgggcacaggctcagaaacctttgggccactttgctgcatttgctataagccaaagttggcaaactatggcagctaagaat

SEQ ID NO: 1248 - DNA, 601 bp, Human
tacaaacaaaagccagggttgggactagagttgtttggtttcctagcctggcattctaccctctgaccggttccatcctgccaagccttttaaaaaagaagagtgatggactaacagtccaaaacctgaccttagggtgacctcaagcattaagtgctcctgaagccacttcctttaagccttccaatgatatcaagacccttgcatgactgaacctccagacacccctggttgccctcgagtcagaaggcactcgccagtcttcaaagtagaactgagaggagggggctggtgcatttakcagcagcagcagcagcgagctgaggcaccctgccagaggctgctcacacattctgattaaccaccatgaacaagcttttggggagcgattactcccttttcacagatgagaaatgagagagagggaaaagcgcagaaccaggggactctaggcttcagggaagtttccaattgggggtctctgatgccaaattctatggctttcctgcttaggtcctcccccttgtttccgggtactggtccctgaaggaaacaaggtttctacctggtgctttctatgtaggtcaaattccataaaagc

SEQ ID NO: 1249 - DNA, 601 bp, Human
ggcgacagagcaagactctgtctcaaaaaaaaaaaaaaaaagtacaaaaattagtggggtgtggtggcacatgcctataatcccagctacttgggaggctgaggcaggagaatagaatcactttaacctgggaggcggaggttgtagtgagcagatattgcacgactgcattccagtctgggcgacagagtgagacactctcaaaagaaaaaaaaataagacagctttggctgcaataagaaagaaagaagctcaagaaattgcagactgctgtaacatcggcacttgacaggaggcaccygaggtcagagggcaggtgcccagcctagcatacaaacaaaagccagggttgggactagagttgtttggtttcctagcctggcattctaccctctgaccggttccatcctgccaagccttttaaaaaagaagagtgatggactaacagtccaaaacctgaccttagggtgacctcaagcattaagtgctcctgaagccacttcctttaagccttccaatgatatcaagacccttgcatgactgaacctccagacacccctggttgccctcgagtcagaaggcactcgccagtcttcaaagt

SEQ ID NO: 1250 - DNA, 601 bp, Human
ggtggggagcaatgtacagcccagagtctgggatccccagcagcccatcagcactccctggggatgagactactttctagaacattccattctcttccaggcctttgctcttgctatgtcctctgcagtctctagcttattacccatctgccactcagtttgggaactccttaagaatagaaccaggggcaggacgcggtgatcccagaactttgggaggccaaggtgggcggatcatttgagctcaggagttcaagacctgcctgggcaatatggtgaaaccaggtctctactaaaattmcaaaaaaaaaaaaaaaaaaaaacagctggatatggtggcacacatctgtatcacctgagcctgcgaggtagaagttgcagtgagccaagatcatgccacttcactccagcctcggcaacagagtgagataaaaaaaaggaatggaacctgggtcataccgtgtctgcagccagagtgacgagagtagggaacagcacatgctaattgccaaacaaagaaacctgccacttttcaatttggcttttgggcaaagctggctctgtgagtatctgttgtgccagaccagtgttcatccttagc

SEQ ID NO: 1251 - DNA, 601 bp, Human
agtcagattaagaaacagcgtgctcagtgtggctcagtgctaggtgtagggggagggacatggcccctgctcctcagtaggcacaagacactgcgaccaatctcagattcatgctgccactctgctgcgcccactatagccggcttgatcattgctgggcttggaagcagacccacgtttaaatgcagcaagctgcctcctttcaccttggagttggatacaaggcagccctgctctgggccttggtttcctcacctagaaaacggggatgaaagttccttccttaaagggttgctgttamgttttctatcagtatccatcatgaagcctggcagaattccctccacaagtgtttgctggatcggcgaagaatagcaagctaccctcgatcgggcagcctcagcaccatctgcccccaccagccagtggctggaactggaacatggcaatgaagtccattcactcaacgtgtatttatttattctggtgtcaagctgatgaacagttggtgatgacttagagaagggtactagccccatagagcttgtgattttcttgtgggagccttttttactggtggggagcaatgtacagcccagag

SEQ ID NO: 1252 - DNA, 601 bp, Human
ggggaccagtcagattaagaaacagcgtgctcagtgtggctcagtgctaggtgtagggggagggacatggcccctgctcctcagtaggcacaagacactgcgaccaatctcagattcatgctgccactctgctgcgcccactatagccggcttgatcattgctgggcttggaagcagacccacgtttaaatgcagcaagctgcctcctttcaccttggagttggatacaaggcagccctgctctgggccttggtttcctcacctagaaaacggggatgaaagttccttccttaaagggttrctgttacgttttctatcagtatccatcatgaagcctggcagaattccctccacaagtgtttgctggatcggcgaagaatagcaagctaccctcgatcgggcagcctcagcaccatctgcccccaccagccagtggctggaactggaacatggcaatgaagtccattcactcaacgtgtatttatttattctggtgtcaagctgatgaacagttggtgatgacttagagaagggtactagccccatagagcttgtgattttcttgtgggagccttttttactggtggggagcaatgtacag

SEQ ID NO: 1253 - DNA, 601 bp, Human
aacagggggctggtatgaggcactgtgagaaccctggagggaaagatttccagttttgcctgggtacaaaaaaagatgagttcccaggaggtgacattggagctgggctgtgaaggacacacagagagtctgccaagtgggaaagcagtggcaaggctacattccaggtggacagaacagtatgtgcagggagaagaaatggggaccagtcagattaagaaacagcgtgctcagtgtggctcagtgctaggtgtagggggagggacatggcccctgctcctcagtaggcacaagacactgygaccaatctcagattcatgctgccactctgctgcgcccactatagccggcttgatcattgctgggcttggaagcagacccacgtttaaatgcagcaagctgcctcctttcaccttggagttggatacaaggcagccctgctctgggccttggtttcctcacctagaaaacggggatgaaagttccttccttaaagggttgctgttacgttttctatcagtatccatcatgaagcctggcagaattccctccacaagtgtttgctggatcggcgaagaatagcaagctaccctcgatcggg

SEQ ID NO: 1254 - DNA, 601 bp, Human
cagtcctgacaccaaggaaggagtttccagtacagtggggtgggggcagtggggaggcagatgaagatgagaggctagtgtggtctgggcttcaacagggggctggtatgaggcactgtgagaaccctggagggaaagatttccagttttgcctgggtacaaaaaaagatgagttcccaggaggtgacattggagctgggctgtgaaggacacacagagagtctgccaagtgggaaagcagtggcaaggctacattccaggtggacagaacagtatgtgcagggagaagaaatggggacccgtcagattaagaaacagcgtgctcagtgtggctcagtgctaggtgtagggggagggacatggcccctgctcctcagtaggcacaagacactgcgaccaatctcagattcatgctgccactctgctgcgcccactatagccggcttgatcattgctgggcttggaagcagacccacgtttaaatgcagcaagctgcctcctttcaccttggagttggatacaaggcagccctgctctgggccttggtttcctcacctagaaaacggggatgaaagttccttccttaaagggttgctgttac

SEQ ID NO: 1255 - DNA, 601 bp, Human
cggatgaaactggacccagtcctgacaccaaggaaggagtttccagtacagtggggtgggggcagtggggaggcagatgaagatgagaggctagtgtggtctgggcttcaacagggggctggtatgaggcactgtgagaaccctggagggaaagatttccagttttgcctgggtacaaaaaaagatgagttcccaggaggtgacattggagctgggctgtgaaggacacacagagagtctgccaagtgggaaagcagtggcaaggctacattccaggtggacagaacagtatgtgcagggrgaagaaatggggaccagtcagattaagaaacagcgtgctcagtgtggctcagtgctaggtgtagggggagggacatggcccctgctcctcagtaggcacaagacactgcgaccaatctcagattcatgctgccactctgctgcgcccactatagccggcttgatcattgctgggcttggaagcagacccacgtttaaatgcagcaagctgcctcctttcaccttggagttggatacaaggcagccctgctctgggccttggtttcctcacctagaaaacggggatgaaagttccttcctt

SEQ ID NO: 1256 - DNA, 601 bp, Human
cccaggaaacttggccaattcctgaccttaggtgcccaaaccagcctagctgacttcaagatactgggctggccgggccatttcctggggagagaggggaagtatgatcttctctctctgtagccaggtctcagagagggagaggctttggattcttgggggtctcatttccctggtggagccatgcctagggtctggtggttctagactctctgactgggaggcccaggaaccagccctcctatgcgagggggcccaaattacttggtaggaatagcacagatatagataggagaagcaycctggatttggagctgaagccgctggcttctgattccagcccatctgcctgtttgctctgtgaattccagcaggctaagtcccccatgtaccacctctcccctatcctccatttgcttgtcagcaaaatggcaacagcttcgtttgtcacattggagatgtgatcccaccttgccctacccttcctgctgttcacagggcaggaaactgagccctgagagggtgaggcaagttccagatcactcaggagcctgcagcagagctcagggctccggactccttacccagtgctcctcacggc

SEQ ID NO: 1257 - DNA, 601 bp, Human
gcaagtttctgtgttcagatatcttgcctgactcttggcaccacaccagtctttctcccaggaaacttggccaattcctgaccttaggtgcccaaaccagcctagctgacttcaagatactgggctggccgggccatttcctggggagagaggggaagtatgatcttctctctctgtagccaggtctcagagagggagaggctttggattcttgggggtctcatttccctggtggagccatgcctagggtctggtggttctagactctctgactgggaggcccaggaaccagccctcctaygcgagggggcccaaattacttggtaggaatagcacagatatagataggagaagcaccctggatttggagctgaagccgctggcttctgattccagcccatctgcctgtttgctctgtgaattccagcaggctaagtcccccatgtaccacctctcccctatcctccatttgcttgtcagcaaaatggcaacagcttcgtttgtcacattggagatgtgatcccaccttgccctacccttcctgctgttcacagggcaggaaactgagccctgagagggtgaggcaagttccagatcactc

SEQ ID NO: 1258 - DNA, 601 bp, Human
cgatggcacagtactcaccttctggggggcattgatgactccagtgttgtagccaaactgcagggagccaagcactgctcctcccacggccagcatgaggcgacccgtcagcttctgcggagaaacaaaccacactgttataggcgtgtctgggagcaggttactacagggcagggcctggactggcaagtttctgtgttcagatatcttgcctgactcttggcaccacaccagtctttctcccaggaaacttggccaattcctgaccttaggtgcccaaaccagcctagctgacttcaakatactgggctggccgggccatttcctggggagagaggggaagtatgatcttctctctctgtagccaggtctcagagagggagaggctttggattcttgggggtctcatttccctggtggagccatgcctagggtctggtggttctagactctctgactgggaggcccaggaaccagccctcctatgcgagggggcccaaattacttggtaggaatagcacagatatagataggagaagcaccctggatttggagctgaagccgctggcttctgattccagcccatctgcctgtttgctct

SEQ ID NO: 1259 - DNA, 601 bp, Human
aagaccccaggattctgtgggacctgagattctagaattctgccaccctgattccaaagcaagagaagagtctctgacatgatcagggccagaaaactggctggagaggcagacagtacagtgcgttcatataaatgactctaattcaggtggtggcgtgagactgtgggcatgtgtgatgtgcaacagagcaggctggtgtccataagccaacgatggcacagtactcaccttctggggggcattgatgactccagtgttgtagccaaactgcagggagccaagcactgctcctcccacrgccagcatgaggcgacccgtcagcttctgcggagaaacaaaccacactgttataggcgtgtctgggagcaggttactacagggcagggcctggactggcaagtttctgtgttcagatatcttgcctgactcttggcaccacaccagtctttctcccaggaaacttggccaattcctgaccttaggtgcccaaaccagcctagctgacttcaagatactgggctggccgggccatttcctggggagagaggggaagtatgatcttctctctctgtagccaggtctcagagagggagaggct

SEQ ID NO: 1260 - DNA, 601 bp, Human
cgggtctacaaaatggaaatcaccacccaatctcataaacacaagcaaaatgcctggtacagaggaagggctcagtttcctttcctgtccctgcctcctaccccctacccccttttcctcttctctcctccttaatgcaagtaggctgggctggaggagatggtctaggtcccttcccatcctgacattcaagtaaacaagtgaggacagatctaggatgcacggcagggaggaggaagccagcacagaccttcaccccctgtggctccctagggcaagacgccatttctgctttgactgscacagggccttcagggagaggacgcggtttcaacctacaaataaaggaagtgtgctgcctgtggatgggtatgagtgcaggctcaaggaccacctggcaggcaggtgttggataccagctctgtctctgacttagctgggtgatattgggcgggtttcctctctctggccgtttcccacacctgcaggctgggagtggtgcctgctgcctcctgacagtgctgcagtgagcatcaagtgagacaagcccatgaaaaccctctgcagccccagaatgccacggaaatgcagcattattgta

SEQ ID NO: 1261 - DNA, 601 bp, Human
ggcatggtggctcatacctgtaatcccagcactttgggaggccaaggcaggtggatcgcctgaggtcaggagtttgagaccagcctcaccaacctggtgaaaccccatctctactaaaaacacaaaaattagctgggcgtggtggtacacacctgtaccagtagcccagctacttggaaagctgaggcacgagaaccacttgaacccaggaagcggaggttgcagtgagccaagatcatgccactgtactctggcctgggcagcagagcaagactccgtctcaaaaaaaaaaaaaaaaaaaggtatctcagtccctcctggccaaaggcagcccctcccttctgctccgacaccaccctccctcctggaagacctccgccctcacttccttatcttcaccctctcctgctgattccttccaacatgtttaaaaataaccttcattaaaataaataaataaattcctagccataccatcattccaaacctcctcttttctccctctcccaccaactcttttggaagagccgtctccaccctttctcatctgcctctcactcttcacccaatcgtagtgaggcttctatccacgctgtgccac

SEQ ID NO: 1262 - DNA, 601 bp, Human
gcagacctcacctcctctgcagaccaggttcctcctttgtcaaacaaggagtgttgtttgtcaaacaattgaggcctttctggcccaaactctggattctgaggatgccttattctcagacatgcctgacactgtcccttgggccaggacttcatggtttctcagtggccgtcagtcatctctactggcagctcagtcatttggggaggggaaaggcagtgctcggatgagcccagtatgatggtcaggattccctggttcatttagctgctccctctgtggctgggctcacctcttctgctctgtcctcctcctccaggaggggatgcatggcaggaatgtcctgtcacactcacagcagggcaggggcagtgtgcagagctggggaggcacaaggcctggagcccacctctagctcagcctctcactctccagatacctcatctggcttcagttccctcatttagaagaggggaagatgtcagccccgcctgccttgtagagttgctgtgaggtggtaatttatggggtggtgctttgtaaacatataaggtagtatgattaattaaccacttccaggaggaagccctttggggcctgt

SEQ ID NO: 1263 - DNA, 601 bp, Human
tatttctagagtatgtataacaatgcctgggcaagctataagtaagcagtaagggtttatggtagtggtgacgggtgaaggggagagaggactagaactctttggatataggagagagaaggagaggctgcctagagcacgaagcccagttcagcctgacgggacacagggcttgggttgggaggcgggtgttgcctccagctctttcactcaccaagctgggtcatcctgggcagacctcacctcctctgcagaccaggttcctcctttgtcaaacaaggagtgttgtttgtcaaacaaytgaggcctttctggcccaaactctggattctgaggatgccttattctcagacatgcctgacactgtcccttgggccaggacttcatggtttctcagtggccgtcagtcatctctactggcagctcagtcatttggggaggggaaaggcagtgctcggatgagcccagtatgatggtcaggattccctggttcatttagctgctccctctgtggctgggctcacctcttctgctctgtcctcctcctccaggaggggatgcatggcaggaatgtcctgtcacactcacagcagggcagggg

SEQ ID NO: 1264 - DNA, 601 bp, Human
tgtctcctctaccccaactatgactcacaaggcacacgcagtgactccctcatacgacctagacacctcacacctttgcttgggcctaatcacctttcagaacatgcacagatactcctctggaaagccttcctcccgagaaccacccctcccactccactgcaactggttctcaaacagagacggctttggtaccccataggacatctgccaatgcccagagacatttttggttgccacactggctactggtatctagagggcagaagccaaggatgctgataaacatcctccaatgcaygggacaggcctctacaacaccagcagaaacatcacagtgccaagctgagaaaccctgctctaagggcgaagcaccctctccctcttccttccctgctcccactgtgcttgctcgcatttccatcatcgcctttagaagactaactgtaaggtaccgtgtgctccctgtacagtaaacctcagcacggagatggtctgtctgatgcatccatgttgctggtgcccagcacggtggtggaggtgcagagttgacactaaatgaccaacaagccatgaatctaactgaagggcttgaggggtg

SEQ ID NO: 1265 - DNA, 601 bp, Human
tggggtaaacattttatgtaaaaggctagctagaatccattaggtagggtctgtgagccacatatggcctctgtcactcattgttctttttttctcaaccttgtaaaaatgtaaaaaccattgttagctcatgggttgcacaaaaacaggctgctggctggatgtggccctcctgccaacccttgatctaggattctagaccactgccaggaggggtatgcgttttggaacctctggctggtctcaccatccttccctctagacattcctttaccccaggaggactaggtcagttaggtcrtccccagcagggatccctgggccaggtttaggctcggtctcaactctccctgtgctctacgggatgctattgtggggaagaaggggctaaactgccagccaagctttcagcgccagttacaaggaggaaagggccagcttctccggcttagcctctcagcctggccttcacccctgttccttgcctgcccctgtcttccagttggggctggccccacactgcccttcccacaagctctcagcccagggccttcatctccacagcaactctcagccacaccccagggtgagctgggagatt

SEQ ID NO: 1266 - DNA, 601 bp, Human
agtcaccactttcggaggagccttagggacaaggttttccattttgaaattgccagaaatcattaccctaagaatgtaagagtaaggaggaacctgaaggaactacgggcctgcctcagggaataaagctagtctccagaccctgctcggctgctcctggcagaggaacccagcactctgtagccccagagggcagaggtgccagggccagactccagctcaggggaaggaagagctttctagacttcagggtatgaggctgcccaccttacaggtggtgagttccctgtaagtagggagyatgcaagtcaaagtgctccagagccggactggggtaaacattttatgtaaaaggctagctagaatccattaggtagggtctgtgagccacatatggcctctgtcactcattgttctttttttctcaaccttgtaaaaatgtaaaaaccattgttagctcatgggttgcacaaaaacaggctgctggctggatgtggccctcctgccaacccttgatctaggattctagaccactgccaggaggggtatgcgttttggaacctctggctggtctcaccatccttccctctagacattcctt

SEQ ID NO: 1267 - DNA, 601 bp, Human
aacactgcctggcacatgggtaagctgttactgctgtcactgttgctctctcaagaaaagaagtcaccactttcggaggagccttagggacaaggttttccattttgaaattgccagaaatcattaccctaagaatgtaagagtaaggaggaacctgaaggaactacgggcctgcctcagggaataaagctagtctccagaccctgctcggctgctcctggcagaggaacccagcactctgtagccccagagggcagaggtgccagggccagactccagctcaggggaaggaagagctttmtagacttcagggtatgaggctgcccaccttacaggtggtgagttccctgtaagtagggagcatgcaagtcaaagtgctccagagccggactggggtaaacattttatgtaaaaggctagctagaatccattaggtagggtctgtgagccacatatggcctctgtcactcattgttctttttttctcaaccttgtaaaaatgtaaaaaccattgttagctcatgggttgcacaaaaacaggctgctggctggatgtggccctcctgccaacccttgatctaggattctagaccactgccag

SEQ ID NO: 1268 - DNA, 601 bp, Human
agctgaggctggggagtgggtttctgcctcttgatgcctgagatttctgggaagaagccacgcctggttttccaattcctactgctggttccggtgctctgtgccctctcctccctggggattcgtatggggttccacgctgactcttggcccaggaaaggcagggggatgctggagaatgagaagaaccctacatggggaaaagctctggggtcacatcctccctagaagtgtctgggtgcacctcaggaaagaagagtctacttattatgccctgacaggatcccacaggcccaatccygccggctcccagcagcctccgcaaccctgggtcatgtgtgaggtgagacctggcacgtgcctgttctgaacgctcccacctcacatgcccgtcccaagcttaggatttaaacacttgatgctgccaccaccccacatccatccatcaccaggtcctctcgattctgcctccgagtctgtcctacttctctacccaggcagcctgccctgggtctcatctggattctgctcccgactcttcctatccaccaaagtcagaccccatttcccacagtgaaccacccctcagaatgcagtcgga

SEQ ID NO: 1269 - DNA, 601 bp, Human
gaagtcagcaaatggaatttgtttgaattgtatacaaagaaagagtaaataggtgctaagtaaggcttgaaactacctaaataagcttgaagatctcttgagatgttggggcaactgacaagagggctgtgtgtaagtgaggtgtgaccagagctccaccctgagttacgtctcctgcctgtggtcacacagtcaaagggacccaaccttgtccagggctggctcctggacgctgcctagctgctctgttactcagaccactttatggggtggaggaagggtgagcagccagctctctgcrtgttcaccttggcctagacccatcctctccagcccacagcagcacttcctggccaagctgaggctggggagtgggtttctgcctcttgatgcctgagatttctgggaagaagccacgcctggttttccaattcctactgctggttccggtgctctgtgccctctcctccctggggattcgtatggggttccacgctgactcttggcccaggaaaggcagggggatgctggagaatgagaagaaccctacatggggaaaagctctggggtcacatcctccctagaagtgtctgggtgcacc

SEQ ID NO: 1270 - DNA, 601 bp, Human
atgggaacggtccagataaatggcgcttgcccttctgagggtccaatctttcctgacccattatggggtgaaaatgtgaagagatttcactttgctctcctgagcaaccagacctacaagcagggctgcagggcaatggtgtctgcccttggggctctctccaggggcaaggagaggtgtttgtccctgtgcagactggctcctgatggctaaatttctgcattccatagttctaaggtattcccccaaccctctgtggttcagaggcttgtcttgtacaactctccacacctcttttgamatttgccaagaagtcagcaaatggaatttgtttgaattgtatacaaagaaagagtaaataggtgctaagtaaggcttgaaactacctaaataagcttgaagatctcttgagatgttggggcaactgacaagagggctgtgtgtaagtgaggtgtgaccagagctccaccctgagttacgtctcctgcctgtggtcacacagtcaaagggacccaaccttgtccagggctggctcctggacgctgcctagctgctctgttactcagaccactttatggggtggaggaagggtgagcagcca

SEQ ID NO: 1271 - DNA, 601 bp, Human
tccaccccttatttccagtgtgaccatgagcaagttatttcatctgtgagtttccatggccccatttctaaagtgcagacattagcaggagctgcttcacagtgctgcagggaatcagtgaaacagtgcttggtgtcatcatccctaaaatcaccccactgcacactggtggcctgaaggctgtgcagaccactaacagagtctccccaagccttcaacccgtaactcaaaatcggggctcctgccaggtatcaatccaatctccctacctaccacacctttgcactcactacacaccatytcccacccctctacgcctttgagatgctactactcctgcctggaaggtacccctggccttattgctgaaacctttcgagatccaggtttccctgactccaggagtttgtcttccctgaggaagacagttgattcacaccatggtctgtcccagagccagtgccagggatacctggtgaggaaatggaggaatcgaaccaaaggtgttaggctctcctcttagaaccccttgattctgctgggggcagacagaaggcagattttgacaaaaaacagagtaacaaaatgcaaagtgttcttc

SEQ ID NO: 1272 - DNA, 601 bp, Human
ccttgtgtctggcctgcgagcacccccttgaaggacccacggcctcctcccctctcccaagggcccagctaggaggtatggggaaaggttccacacaaggaagcagttccaggaactggaaacgcccgtcctagggcagccctgcccaccagccctgcccccaccctggccagctcccacggatgtggtaggcaggcagcacccgttctgcctgagcacactcaccacactctcagtgccatgggactggccagacccacccagccacacgtatagcagagtgcaggccctagttacccaraaacggcttcttatgcacgtataccatcacacacacatacccgtgctcatagaatctaaatattcctgctttagccagtcacaaactcacatgcccctcatcccctaccacttacagctcaaactcaattccatgtgaacccaacccatcccaacacccctccgtgtgtgtgcatgccacaggttcatgcacacacagcggtatgcagcctctgcagcctccatcactgctgttggtcctccctatcccttccaacccactgaggtctagcagaagaagaaggtgtgggcaggcacactt

SEQ ID NO: 1273 - DNA, 601 bp, Human; identical to SEQ ID NO: 686

SEQ ID NO: 1274 - DNA, 601 bp, Human
ttctaaactttcagcggactcgattgggcgaaagccttccggctccctttactaagtcgtttaggtggtggctggggggacaaaggagggtttttatctttaaaagataagtacggtttagaagacacgggagaaataatccattttgttatgttatgcagttgaactgtatagcttctctagttttgtgtttttaatgttctgaaattcaaaacagcagggatggccttcgccgacgcaggagtcgggcattttaaaataggctgtttttcttttggagcgttcttcttgaaggatattstttgtgcaagacggcgatttttgagaacacaggcaggagggagggggtgttttaatgtatgtttttactccatgataccaaagcttccccccaggatccctttacagtggttagttcctggaaacctgatgggtggtcagaaggcaccccaaatctcgattatggtttgctgaagtcttgactgactcagtacctgcccctccctccatctctgaaatgtggagaattaaaagctatgcctgtgaacgggcgttcagtttttagccgggaaggtgctagaccacttaactctgatagaaa

SEQ ID NO: 1275 - DNA, 601 bp, Human
tttttcttttggagcgttcttcttgaaggatattgtttgtgcaagacggcgatttttgagaacacaggcaggagggagggggtgttttaatgtatgtttttactccatgataccaaagcttccccccaggatccctttacagtggttagttcctggaaacctgatgggtggtcagaaggcaccccaaatctcgattatggtttgctgaagtcttgactgactcagtacctgcccctccctccatctctgaaatgtggagaattaaaagctatgcctgtgaacgggcgttcagtttttagcsgggaaggtgctagaccacttaactctgatagaaataagctgctgagccctatcagggagggcgttctttcagctgttgtctggtggagaaataaagacagggtgttggttcagttgcaggtattttgctggcgtattgagagattagagtttcctctttgagtgtgatggcagtagaaagagtgttgtttatcttagaaaacttagtttctgaagcagaggcagtcatatggatgtgtttgttttgtatcaccataatgtgaacagagcatctaaatgaaggcggttcggaggttctgag

SEQ ID NO: 1276 - DNA, 601 bp, Human
acatagcaagcaaatggtgttttgtggaagggtggggtttgtgtcaggatttgaaatgtaaaaggtcataatgtttgatttgtcgaaaaagattagaaaagttcaactctaagaaatatgctaaggttgaatagatgaagcttaaaaatatcacaaaaagtgaaagaagtcagtcacaaaagaccacatatcgtatgatccggtttatgtgaaatgtctagaataaacaaatccatagaggcagaaggtagatgagtggttgccaggggctgggggcggatggaatggggagtgactgctrgtgggcacagggtttctttttggggtgatgaaaattgttctaaaattagtttgtggcgatggctgcatagctctaaatatacttaaaaccattggattatatactttaaatcggggactttaatggtatgtgaattatatctcaataaaccctttttttttttttttaaagaaatgtgatcaggttgaaaataacttgttatgctaccttaaattacgttaaaattattacatatatttgacaggctgatgtctctctctcttttcatttatgagtttttcagatccgtgagttgcagca

SEQ ID NO: 1277 - DNA, 601 bp, Human
caaaaagtgaaagaagtcagtcacaaaagaccacatatcgtatgatccggtttatgtgaaatgtctagaataaacaaatccatagaggcagaaggtagatgagtggttgccaggggctgggggcggatggaatggggagtgactgctagtgggcacagggtttctttttggggtgatgaaaattgttctaaaattagtttgtggcgatggctgcatagctctaaatatacttaaaaccattggattatatactttaaatcggggactttaatggtatgtgaattatatctcaataaaccctttttttttttttttaaagaaatgtgatcaggttgaaaataacttgttatgctaccttaaattacgttaaaattattacatatatttgacaggctgatgtctctctctcttttcatttatgagtttttcagatccgtgagttgcagcaatacaacaaactgataattgaagcttagcaacagggattcaatcccgcagtagaaatgggcaagcaggagaaaaagaatcttggttctatgtagcttcagttagggattgaggagctggatttaaaaaacacaaatgctggtggagggcagat

SEQ ID NO: 1278 - DNA, 601 bp, Human
ctggaaaatggtgtttggcatcagcttagcaagaggaggttttccagttatttgtaaagatgtgatgtggctttaagtggggatgggggagggtagcagccccagtgtttgtggacattgagacctgttgacatttgggaagcataactgagttccactatttgaaaagattaaaactttgatatatgtacacatcccctcatgcctgcacccccatccccgagggtctggaaaagaattgatttgttctgaggaaggaacatatatttggaatataaaatggttagtaaacaaaggatctttaaaacaagttagattgttatctcaagagaagcatacttcctcggcatgatgttttcttttgttaaattgctttggttttatttgactcaaagtattaacaatacctttgattttgagacttttggacttttgaagactaagtttttaaatggtcaattttactcgtttgaaagtcccagataccatttttgaagatttctctccctttttttccactgatgccggctttacttatgttttattttcaaatcttaaggaaaaactgatatttccttacttgaactgagaaatagtcgtt

SEQ ID NO: 1279 - DNA, 601 bp, Human
gaaaatggtgtttggcatcagcttagcaagaggaggttttccagttatttgtaaagatgtgatgtggctttaagtggggatgggggagggtagcagccccagtgtttgtggacattgagacctgttgacatttgggaagcataactgagttccactatttgaaaagattaaaactttgatatatgtacacatcccctcatgcctgcacccccatccccgagggtctggaaaagaattgatttgttctgaggaaggaacatatatttggaatataaaatggttagtaaacaaaggatctttwaaacaagttagattgttatctcaagagaagcatacttcctcggcatgatgttttcttttgttaaattgctttggttttatttgactcaaagtattaacaatacctttgattttgagacttttggacttttgaagactaagtttttaaatggtcaattttactcgtttgaaagtcccagataccatttttgaagatttctctccctttttttccactgatgccggctttacttatgttttattttcaaatcttaaggaaaaactgatatttccttacttgaactgagaaatagtcgttttc

SEQ ID NO: 1280 - DNA, 601 bp, Human
tgacagagcgagactccatcacacacacaaaatacatatataaaaataaattgctcacctggtaatagtctggaaaacattttttttttgtttttttgcatattttaaagactttagaaagtagtcttgctaatccagaaagttcttgcggggaggagtttgaaactttgttttatctcactcctcagtcttagcccccttaataccataggtctctacttcagtaagagttacataatacgaatgccgtttgttcagaattgtgtatctccatccatccgtccatcgtccaaattctgcragtttgaaatacattgttgttgctgttttgtatacttttgttcaaccattttctttttaacatggcactagctttctcaaactggctttggaattatttgtcagtttaaaaataaataccactttaaaaattactcttgacatgggagaacaaatatattttgatagttgttagagcataaatattttatagagcataacttgaaatttttcctgatacattgtgattgctttcagcttgtcctctgctgtaaaaaatatagtcgtggttagtctctgtaaagttggttattgggaatat

SEQ ID NO: 1281 - DNA, 601 bp, Human
aataaataccactttaaaaattactcttgacatgggagaacaaatatattttgatagttgttagagcataaatattttatagagcataacttgaaatttttcctgatacattgtgattgctttcagcttgtcctctgctgtaaaaaatatagtcgtggttagtctctgtaaagttggttattgggaatatgtgcttgattacgtaaatgagacatcaccaatttaagtcagccaaagtttagtcaatagaactttaaagaacagaagtctaatggtaattagggagagatgaatttatttrtaggagttttccccaaattcaaagcgtcttagtgacctttgataacttcctggaaaaagtaggaagcatggagagaaattccaggtaggagcccatgatccaattgactgcatcagcttacaaagtgttttctaagtcattagctattaattctgtctagattgtaaaatccctctcagttgtgtccacatttatctgtgttgtcctgtatttattctctttacctaatttccctgagtctcattttagtgggataatacacaagcttacagactcaggactttaaagagaagcacagat

SEQ ID NO: 1282 - DNA, 601 bp, Human
agaataagaataaatacatccagtgttgtgttaggtcccacaccgtctatatttcgctagctaattttatgtattttgtttcatgttttattgatattttcagaatctttcttgctgagattacacaaaatatatagctggttattcagttttacgtgtcaaaagccttaaacctgtttccccatgattgccttttattatttttaattcggaaatctttgtttggctgtctgagagagaacttcagcctcccttcctcccagacattttgaacagttcaggctgtactcattcgtgtctytttgtcttggcaggtggaagcccctctgcttggaatagcaaacaatactaccagcttgccctctggcaagctcctttaagagttagctgtaatttcaccctctctctggccttgattctgcatgcagaatgattgcactgacttgagctcctgtggtctcttgctatacctcctatttgggcatctcccccatattgctttcccccaccattggggaggggaatggtaccttggttatctttgaattcccaggaggtggcccagtgcctggtgcataggaggagctgaagaaacggaaga

SEQ ID NO: 1283 - DNA, 601 bp, Human
tttcgctagctaattttatgtattttgtttcatgttttattgatattttcagaatctttcttgctgagattacacaaaatatatagctggttattcagttttacgtgtcaaaagccttaaacctgtttccccatgattgccttttattatttttaattcggaaatctttgtttggctgtctgagagagaacttcagcctcccttcctcccagacattttgaacagttcaggctgtactcattcgtgtctctttgtcttggcaggtggaagcccctctgcttggaatagcaaacaatactaycagcttgccctctggcaagctcctttaagagttagctgtaatttcaccctctctctggccttgattctgcatgcagaatgattgcactgacttgagctcctgtggtctcttgctatacctcctatttgggcatctcccccatattgctttcccccaccattggggaggggaatggtaccttggttatctttgaattcccaggaggtggcccagtgcctggtgcataggaggagctgaagaaacggaagacttcttaaagggatactcgccattcactttgaagcacttctttgtacaaca

SEQ ID NO: 1284 - DNA, 601 bp, Human
actgatggagtggagagggtgtcagaatccggtgtttgtgtggtgggaaggaattgactgctggctagagaatgaggagcgctgaaacctttgcaccattgcagtggacccgctgagaagggtgttctggggaggctgctctggtctctcgatggagtcaggattgggggacagatagacaccccggtgtgagccagtgatggtatagatgagggaggcagtgaggacaggctcagggagggaagtcttgtctctagacctgagaccaggaagcaggaatggactggacaggttggcccasctgagggaggtgactggtgagatgggtcctcggtgtgaggggctgggttgccagaggagctgtgggctggggtggtttgtcgagagagcagtcccagttgatggagaggcaggacccgcaaaacaggttggctgcaggactgggggcggtagcacagggcagctcccgaggagacacctggcacttttaaggcatggaatggagagagctaggggagagcacacctgcagtgaggcaattcacatagcaaagttctccggaaactgcagtgttcaacttttttaaagaatagctggatgt

SEQ ID NO: 1285 - DNA, 601 bp, Human
taccatgcaagtgaagaggaacagtttgtttaaagaggggtgccagcttcacatccaggcctggactttgctactggtgcttttgaacttgtgttgatttatgtttgtaaattgactggacacattgtggttcttgatgagaagcaattgcccatccttagcccacgattagtgccactctctgggtgctgcctgttctgccactgtaactgttttcacttgacaaataacattaaaaaacacagttctgcaagagacttcctgggagggtggtatcatttggcctgtgggcttttgtaayactttcctgctattaggagagtgaattctgaattttcaatcacgttcacctgttggagcaagtagagtttcagacggtctccgcttttctcgactagaaagcaggccttctcccttttccccccagtcttgtttcatgacaccattcccctctgagatgagggttggagaattagaagtctactgatgcattgtaccggggcacgttattgaccctctctgctctcctttcctcatctgtaaaatggaagataatgccacccatcaggccgagtgcggtggctcatgcctgtaatcccag

SEQ ID NO: 1286 - DNA, 601 bp, Human
ttcacatccaggcctggactttgctactggtgcttttgaacttgtgttgatttatgtttgtaaattgactggacacattgtggttcttgatgagaagcaattgcccatccttagcccacgattagtgccactctctgggtgctgcctgttctgccactgtaactgttttcacttgacaaataacattaaaaaacacagttctgcaagagacttcctgggagggtggtatcatttggcctgtgggcttttgtaacactttcctgctattaggagagtgaattctgaattttcaatcacgttsacctgttggagcaagtagagtttcagacggtctccgcttttctcgactagaaagcaggccttctcccttttccccccagtcttgtttcatgacaccattcccctctgagatgagggttggagaattagaagtctactgatgcattgtaccggggcacgttattgaccctctctgctctcctttcctcatctgtaaaatggaagataatgccacccatcaggccgagtgcggtggctcatgcctgtaatcccagcactttgggaggccgaggtgagcggatcacctgaaatcaggagttcg

SEQ ID NO: 1287 - DNA, 601 bp, Human
aattctttgttgtgtatattttaccacaattttaaaaagcttatttctcaattgtttatgcgagtatatgtgtggaatagttggggagacaaattcaaggagaccagtccttgtccatggcggtcctaggtaccacgggatcactgcgggggaactgtgaggtcaggagaggccttgaaaaaaaacgcaggtttgagctgagtcagatggaatgggtctgttttctatatcaagagacagtattgcagataatttttttctttcaaggaaagcaagtcaggagtcaaactctcatgccacygtagtcacaaatgaaatttattgctaatcagccatgtgacgtgtaattgctttttcattttcttatttttccagaagagagatttgtttagatgtttgattccctcactgattatgattatactggaagtttttcatttgttttgacagctcaattttttttttattgtaaatggactccctcattacagaggggggagcccttgaaagaaagggattgacctctgcaggcaagaatctgagcatcctaaaagtagaaaagggctagaggcttcgccttacaggccaggaagcttggagg

SEQ ID NO: 1288 - DNA, 601 bp, Human
gtgcctggcccattttataattttgatcattaaaaaatgatgtgataaaattattgtgtattgttgttgatacactactctgattaattctttgggctagattcctaaaagtggaaagtaaggaataagaattgtgtaagtgtgcatgatcctagataaatattgccaaaatattttgcagaaaattcttagtttcagcttccagaagcagtgtctgtcatccatactccaccagaattgaacactaaattgagctttgcaattttagcatttaaaaagttgtatcatttaatatagaatrgcagtctcttcattatgatcttcccttgcctagtaagtttatactcaagtcaaaatcggttaatcatgcatattgattccttgtttatctttttcttttaattctttaatacttctagaatgtatttgtagttaagtgaagtaagatacctcctcctgttgacgatttagtttccccacattgtgctgttttttttcttcactggattatgtaacaatatcttttcttttttttctttctttctttttttttttttttttttgagagagtctcgctctgttgctcaggctggagtgcaga

SEQ ID NO: 1289 - DNA, 601 bp, Human
ggttatttctggttaatgaatgctttttgttgctaatgtagaaggaatctttattccccattgtttattttatatttttaaattttttttcaattaaaaaaaatttttttttcattcctgagacagggtctcgctccgttacccaggctggagtgcagtggtgcggtcatgactcactgcagccttcagctcctaggctcaagtaatcctccacctcagcctcctgagtagctgggactactggtatgcgccaccatgcctggctaagttttttctttttcttttagaggcaggatcttgytgtgttgcccaggctggtctcaaactcatgacctcaagtgatcctcccaccttcacctcccaaagtgctggcattgcaggcgtgagccaccatgcctgaccttccttgtttcttttaggtgattattggttgtgtgtgaggaaagctctggtattttctgtacttatcttgtacctacccaatttgttgattgctcttattcgttataatagtctttcagttgactcttcctaatttttttgtgccgagaatcattgatgacaaataaggataatttggtctccatttttctggtacata

SEQ ID NO: 1290 - DNA, 601 bp, Human
attttttttcaattaaaaaaaatttttttttcattcctgagacagggtctcgctccgttacccaggctggagtgcagtggtgcggtcatgactcactgcagccttcagctcctaggctcaagtaatcctccacctcagcctcctgagtagctgggactactggtatgcgccaccatgcctggctaagttttttctttttcttttagaggcaggatcttgctgtgttgcccaggctggtctcaaactcatgacctcaagtgatcctcccaccttcacctcccaaagtgctggcattgcaggygtgagccaccatgcctgaccttccttgtttcttttaggtgattattggttgtgtgtgaggaaagctctggtattttctgtacttatcttgtacctacccaatttgttgattgctcttattcgttataatagtctttcagttgactcttcctaatttttttgtgccgagaatcattgatgacaaataaggataatttggtctccatttttctggtacataatacgtctttacttaccatcagttgtgtgtcacttaggaatataaatggctgaaaataactgaaagcctgcctaataaggg

SEQ ID NO: 1291 - DNA, 601 bp, Human
agccttggagccgcagcctccttgggtggtgtggcagctgtcagtgtctgaaaccattttgaactttaaagggtggtgtcagacagcagctattgaggctacttaaaagaatttttttaaatgtacgagttcagtggcattaagtacattcatattgttgtgcaaccatcaccactgtccatctccagaacttgttcatcttcccaaactgaaactccatgtccatcaaacaactccccattgcctttttccccaagtctttggcaaccgccattccactttctgtctgtaaatttgactrtctggatacctcatgtaagtggactcgtacactatttgtccttttgtgactggcccattttatgagcataatgtcctcaaggttcattcaggctgtagcatgtgtccagaatctccttcctttttaaggcccaataatatttaataatatatgtatgtgtgataacacatttatataatgtccattaccatgtggtatatatgcttatccatttgtctgtcgatggacacttgagttgctcccccgctttggctactgtgaataatatgactgtgatcatggatatgcaaatatttcctt

SEQ ID NO: 1292 - DNA, 601 bp, Human
tttttccccaagtctttggcaaccgccattccactttctgtctgtaaatttgactgtctggatacctcatgtaagtggactcgtacactatttgtccttttgtgactggcccattttatgagcataatgtcctcaaggttcattcaggctgtagcatgtgtccagaatctccttcctttttaaggcccaataatatttaataatatatgtatgtgtgataacacatttatataatgtccattaccatgtggtatatatgcttatccatttgtctgtcgatggacacttgagttgctccccygctttggctactgtgaataatatgactgtgatcatggatatgcaaatatttccttaagtctttcagttcttttgggtatatacccagaagtggaattgctggatcatatggcagttctatttttaattttttgaggaaccactgtactgttttccatgtagactgcataagaattccaatttttccacatcttgccaacgtttatttttatttatttctttaaattttttatagtagctatccattctaatggatgtgaggtggtatctcattatggttttgatgggacttttgagtttt

SEQ ID NO: 1293 - DNA, 601 bp, Human
ttttttttttgacagagtcttgctctgtcacccaggctggggtgcagtggcgtgatctcagctcactgcaacctctgcctcccaggttcaagcagttctcctgcctcagcctcccaagtagctgggattacaggtgtctgccaccacactcggctaatttttatatttttagtagggacaaagtttcatcatgttattcaaattcctgacctcaagccatctgcctgccttggcctcccaaagtgctgggattacaggcgtgagtcactgtgctcagccagttgcactacattttttttttagatgccattgttgaggatccaggggtttgtcatagattgattaatcagaaagtattaatctaaagtattagaatatattgattgcaggcagggaccttgcatagtttaaagatgactcagaaggcacattaggttcttgccacactttgctgccatcacagatggatgtgagttgcccccttatataggtctctcgggatgccccagtggagaacagcattgatgttgaacagatcctgtccgatggagagataccagcgtttcagccagcggtgtgagtgagggcaggggccacctct

SEQ ID NO: 1294 - DNA, 601 bp, Human
aaaccttatgtaagatgatggtgagtttggactttccagtaacatttggaaactgtttagtaccaagctctcattaacaatataaacaaaataggggtctacccttaaggaatcaaagccattatctaaaagctctttcccgcaacaactacctgagataatgtccttggtcatatgccccagcatttaaaaatggagttagtgagagtctgttgtttaccacctgatacattggtaagagctgcttgatggtatggggacatcagtagggaggatatagacgtagccacccccgccctasatagtaggggcctcagggtggggtaagcctgggtgggggaggtatgagtggtggaacagtgggagaccctggatccttagtctccagcgtgattgcattttgccaaggctttgtcccatgtccctttgtcccgtgttccatttgcccgtggtgttgcctagagagcatggaggggctggtggagcatgctctgtggttccctaacccagggctgtgtggggagagcttgcagcacccccctgaccccatatgaacgtccttgctatttcctgctgtgccatccagcaactataggatgct

SEQ ID NO: 1295 - DNA, 601 bp, Human
tatgccccagcatttaaaaatggagttagtgagagtctgttgtttaccacctgatacattggtaagagctgcttgatggtatggggacatcagtagggaggatatagacgtagccacccccgccctagatagtaggggcctcagggtggggtaagcctgggtgggggaggtatgagtggtggaacagtgggagaccctggatccttagtctccagcgtgattgcattttgccaaggctttgtcccatgtccctttgtcccgtgttccatttgcccgtggtgttgcctagagagcatggagrggctggtggagcatgctctgtggttccctaacccagggctgtgtggggagagcttgcagcacccccctgaccccatatgaacgtccttgctatttcctgctgtgccatccagcaactataggatgctgtgctgtggctgggagacctgtttggtcttggaagctgggtcctggatgagcagaatgaggcaggcatagaggtgatgttggctacgggcaggggagcatttgctttgccttggagtagtgccatttccatgtagaggggcaagatttaccaccctgttgtggggatttgaga

SEQ ID NO: 1296 - DNA, 601 bp, Human
cctgctgtgccatccagcaactataggatgctgtgctgtggctgggagacctgtttggtcttggaagctgggtcctggatgagcagaatgaggcaggcatagaggtgatgttggctacgggcaggggagcatttgctttgccttggagtagtgccatttccatgtagaggggcaagatttaccaccctgttgtggggatttgagactttgggttttgttttcctttacaccttgagctttgttctacagcaggtccctgggaagactggtccacaaagctgctgaatggggctgctgtccwtcagccctgcctcctgctgcagaatgcagaggacgctgtagacttgcttggtgggtgcctggggttttctgcctccctggtgcactgggcacagcggcttgcctgccttttgggtcgtctccacctcccagggatgtttttgttccctgatcgaatgacctcctgttttgtttgttttttgagacggagttttgctttgtcacccaggctggagtgcaatggcatgatctcggctaactgcaacctctgcctcccgggttcaagtgattcttgtgcttcagccttctgagtagctgggac

SEQ ID NO: 1297 - DNA, 601 bp, Human
ctgctgtgccatccagcaactataggatgctgtgctgtggctgggagacctgtttggtcttggaagctgggtcctggatgagcagaatgaggcaggcatagaggtgatgttggctacgggcaggggagcatttgctttgccttggagtagtgccatttccatgtagaggggcaagatttaccaccctgttgtggggatttgagactttgggttttgttttcctttacaccttgagctttgttctacagcaggtccctgggaagactggtccacaaagctgctgaatggggctgctgtcctkcagccctgcctcctgctgcagaatgcagaggacgctgtagacttgcttggtgggtgcctggggttttctgcctccctggtgcactgggcacagcggcttgcctgccttttgggtcgtctccacctcccagggatgtttttgttccctgatcgaatgacctcctgttttgtttgttttttgagacggagttttgctttgtcacccaggctggagtgcaatggcatgatctcggctaactgcaacctctgcctcccgggttcaagtgattcttgtgcttcagccttctgagtagctgggact

SEQ ID NO: 1298 - DNA, 601 bp, Human
atttgagactttgggttttgttttcctttacaccttgagctttgttctacagcaggtccctgggaagactggtccacaaagctgctgaatggggctgctgtccttcagccctgcctcctgctgcagaatgcagaggacgctgtagacttgcttggtgggtgcctggggttttctgcctccctggtgcactgggcacagcggcttgcctgccttttgggtcgtctccacctcccagggatgtttttgttccctgatcgaatgacctcctgttttgtttgttttttgagacggagttttgctytgtcacccaggctggagtgcaatggcatgatctcggctaactgcaacctctgcctcccgggttcaagtgattcttgtgcttcagccttctgagtagctgggacttcaggtgtatgccaccatgccacgctcatttttgtatttttagtagagatggggttttaccatgttggtcaggctggtctcgaactcctggcctcaagcagtgcgcctgcctcagcctcccaaagtgctgggattacaggcgtgagccaccgtgcctggcctgacctcctgtcttctgtttttgcccactgtcaag

SEQ ID NO: 1299 - DNA, 601 bp, Human
cagtgtttttcttctgtttttgcctttggctgataccactgctagagtgcagataagagaatgttactaccagggggcttgagtgtcgggctatgattggctgtcatctggagcagagtgggactgagctgctcaggagaaaggtcttcaggtgattttttttgggaagctaagagcactggttttagacatcctctcctggctgatgatgggattggccttcatggggctgctgtctggctgggctggtgggcagaggttcctgtgggtgtggatggagaaatcctaaatgccgagggtrcctggtcttagtagaaatcgtaggatgcctcagtgaagaagtcagggatgcggattgtcctccggatgcttggatgagcgtgcagtggaaaaagtactcctttgggggaagaggtgaatctggaggtgttagagcagaagagtaaatgcagaagttgtagcagatacaaaggctttggcaagagtgggagtgatcattgaagggaaggcaggggcttgctgggacaggctggagccgtgatggaccctcatagtaaccctgctgcattttacaaaggaagaactgtgttggggtacagat

SEQ ID NO: 1300 - DNA, 601 bp, Human
ccatttccctggggagtcagtgcagcactcctgggggacccttctgtttgtgtcctgacgaatctgactgtgctggatgcagtcccacagccacacctggtatgggtggcatctttaaaggcctggcctgtgtgtgctgtatctgcagcagagctgtggccaaacctgctttccttccatctgggttccccttggttctcggtggtggacgggctgtgtggtctcccctcagctgtccacttgcacttgtgttaaaatgcggcagaactttccctctatacttaaattgtggtgaaatacrtatgacataaaacttaccatcttaacttttttttattgagacaggttctcattctgtcacccaggctggagtttttttattgagacaggatctcattctgtcacccaggctggagtgcggtggcgcgatctctgctcactgcaacctctgcctcctgggttcaggcgattctcatgcctcagccacccgagtagctggaattacacgcgcccgccaccatgcctggctaacttttgtattgttagagatggggtttcgccatgttggccaggccggtcttgaattcctggcctcaagtga

SEQ ID NO: 1301 - DNA, 601 bp, Human
acgggctgtgtggtctcccctcagctgtccacttgcacttgtgttaaaatgcggcagaactttccctctatacttaaattgtggtgaaatacgtatgacataaaacttaccatcttaacttttttttattgagacaggttctcattctgtcacccaggctggagtttttttattgagacaggatctcattctgtcacccaggctggagtgcggtggcgcgatctctgctcactgcaacctctgcctcctgggttcaggcgattctcatgcctcagccacccgagtagctggaattacacgygcccgccaccatgcctggctaacttttgtattgttagagatggggtttcgccatgttggccaggccggtcttgaattcctggcctcaagtgatccccctgcttcggcctcccgaagtgctgagattacaggcgtgagccgccgcgcctggccttccttttttttttttttttaagagatggagtcttgctctgtcgcccaggctggagtgccgtggtgcgatcttggctcactgcaacctctgcctcccaggttgaagtgattcttctgcctcagcctcccgagtacctgggattacagg

SEQ ID NO: 1302 - DNA, 601 bp, Human
gctcactgcaacctctgcctcccaggttgaagtgattcttctgcctcagcctcccgagtacctgggattacaggcgccaggcaccatgcctggctaatttttgtatttttagtggagatggggtttcaccatgttggccaggctggtcttgaactcctgacctcgtgatccgcctgcctcggcctcccaaagtgctgggatcacaggtgtgagccaccacgcccaccggcctcccatcttaacattttaaagtgttcagtttaagtacctttacactgctgtccaatcaatctctagaacrcttttcatcttgaaaaacggaaactctgtacccattaataactcccattctctcctaccacagccacgggcagccactttctgctgtctccgtgagtctgactactttgagtacctatgagcagaatccgcaggatttctccttttgtgactgccttatttcacttagcataatgtcctcaagctccatccaggttgttgcatgtgagaggatttccttcctgtgcatgaactagagtgatgcagggactgacctctggccatgtgatgggtggttggtgatggatccaagaggtagctg

SEQ ID NO: 1303 - DNA, 601 bp, Human
tgcctggctaatttttgtatttttagtggagatggggtttcaccatgttggccaggctggtcttgaactcctgacctcgtgatccgcctgcctcggcctcccaaagtgctgggatcacaggtgtgagccaccacgcccaccggcctcccatcttaacattttaaagtgttcagtttaagtacctttacactgctgtccaatcaatctctagaacacttttcatcttgaaaaacggaaactctgtacccattaataactcccattctctcctaccacagccacgggcagccactttctgctktctccgtgagtctgactactttgagtacctatgagcagaatccgcaggatttctccttttgtgactgccttatttcacttagcataatgtcctcaagctccatccaggttgttgcatgtgagaggatttccttcctgtgcatgaactagagtgatgcagggactgacctctggccatgtgatgggtggttggtgatggatccaagaggtagctggtctctgaatactagcccagtccttttccttgctaggaaagtccccagatcagatagaaagcctcagtatttcaagaagcttctgt

SEQ ID NO: 1304 - DNA, 601 bp, Human
gttgggggacagttgggggaatagttgaagctaaggtgtttaggcagagctctgaggaggtgacgtttgagtggagacccagatggctagagaatggggcagcctcctgaaggagcagaagcactgtgggcggcagggtatcacagaggaggagctcggtgtgttggaggttggtgagtcccgtggagtcttgtcagatggtgttgggacagggacggaccgtgaggaggctggatcatggggaatgtgttgctttaggccaagctggagttgatagtggctcagatcagagctaaagtartggagacacacagacattgaaagaatgatgaaattcactcattctgcgtgtgtcccatgtcatgtgtccgctgcacaccaagtactgttttaggcactggtgatataattgtgaaccaactggagctgcggtgagagagaccatgaaaagaagggccagagcggtgtcctgcagagggtggtgtaccttgggagggaagtgtgtagggttgttgaggaacagtgtgctgcacagggaggaaagacgtggggcagcattgtgggaagagcaaccaagattctcataggcttgggagcggaa

SEQ ID NO: 1305 - DNA, 601 bp, Human
gtgttgctttaggccaagctggagttgatagtggctcagatcagagctaaagtagtggagacacacagacattgaaagaatgatgaaattcactcattctgcgtgtgtcccatgtcatgtgtccgctgcacaccaagtactgttttaggcactggtgatataattgtgaaccaactggagctgcggtgagagagaccatgaaaagaagggccagagcggtgtcctgcagagggtggtgtaccttgggagggaagtgtgtagggttgttgaggaacagtgtgctgcacagggaggaaagacrtggggcagcattgtgggaagagcaaccaagattctcataggcttgggagcggaagccctgaggtctgttgctggactagatatgtgaggtgtgagaggagagaagaatcaggaatgactctttgattcttaacgtgagcaactcagagaatgagagtgctgcagtttacaagcttggaaggtggattatgtggggggatgagtgagttgtttgacacctcaatggatatactcagatggatgtatacgttagagctcaaaagagtctgggccagtgacatgaatttgatcatatctagag

SEQ ID NO: 1306 - DNA, 601 bp, Human
actcattctgcgtgtgtcccatgtcatgtgtccgctgcacaccaagtactgttttaggcactggtgatataattgtgaaccaactggagctgcggtgagagagaccatgaaaagaagggccagagcggtgtcctgcagagggtggtgtaccttgggagggaagtgtgtagggttgttgaggaacagtgtgctgcacagggaggaaagacgtggggcagcattgtgggaagagcaaccaagattctcataggcttgggagcggaagccctgaggtctgttgctggactagatatgtgaggtktgagaggagagaagaatcaggaatgactctttgattcttaacgtgagcaactcagagaatgagagtgctgcagtttacaagcttggaaggtggattatgtggggggatgagtgagttgtttgacacctcaatggatatactcagatggatgtatacgttagagctcaaaagagtctgggccagtgacatgaatttgatcatatctagagtatgagtggcacaggaagccacttgtctggatgaggtgacagaggaaaaggttgaggatagcaaccaacatttagaggtaaggtagaaggc

SEQ ID NO: 1307 - DNA, 601 bp, Human
tgccaagtgctggtttctgctattcttttctctgtcttaggggtgtcattttctctttggtaaaacagaagaattagatgatatgaagtttcacattctaagttctcaagctttgcccactcctcagcccttgggtccctccacttcctcttctcttcgctatctctgctcagtttctgtctttgattgtaatgtaatgcccagtgggacttttcttctctccctcgtctgttcacttattccgtcctgcactgggccaccagattaatcctgcaaaaggcctcacatgggcttctctccygctcaggagccttgtgggggctttattcctctgagatgaaagttcttatccccacatgtgatcctttatgacttgggtgctatcaaattcatttcctcaactgctcccctcttcaccctgaccatcagatctgctggcacatgggcataccttgttctgcattgtctctggcctgtgggatatttaccgagctttaaatcctaggcaccctttgggagccggcctgtgtgcagagctccccttagcacggtggcacaaagcttggacaccacctcttgtctgtcctgcttaattccattc

SEQ ID NO: 1308 - DNA, 601 bp, Human
gagaagctttaatagtgtacttgggattattaaatcctaaaaaaggttatcacaaagagttttcttggtgtgtgtctgtgcttagaatttagaaaataagtcatccagtattgaggccattttatgaaaagcctttaaaatctgcaaatgcgttggcccagcacttccacttctagggatttatcctaagaaaatagtcttgggtatctgccaataatgttcactggagtgttgtttataatgtgcaaaacaggagctaacctaaatgtccaacaataagggattggttaaaaaaaaaaaacaaccctcatggtgtgtattaatactctggaactactgtccccttaaaatggtgatgtagaaggacatgtattgacctagtaaaatattaagtgaaggaagtgtgtttacaaatgtcatttttgtctgatttcacttaccttcatttatagagagtggataattggcatagatagtgttaacattgtttatcgtggaatgttgagatcgttgatgatttttactggtttttttttttttggttattacctctaaactctgtaggaagcatgctttcttgatcaataaaacttaaagttgg

SEQ ID NO: 1309 - DNA, 601 bp, Human
aatgtgcaaaacaggagctaacctaaatgtccaacaataagggattggttaaaaaaaaaaaacaaccctcatggtgtgtattaatactctggaactactgtccccttaaaatggtgatgtagaaggacatgtattgacctagtaaaatattaagtgaaggaagtgtgtttacaaatgtcatttttgtctgatttcacttaccttcatttatagagagtggataattggcatagatagtgttaacattgtttatcgtggaatgttgagatcgttgatgatttttactggtttttttttttttggttattacctctaaactctgtaggaagcatgctttcttgatcaataaaacttaaagttggagtttatgctgcttttattcataaaaaaatcacgtttttaatcttctgttaggttatcctttatgtctacattaatgcacgtgtggagagaacacagtctactcggcttatgtcaaatggtagtgggaagcatggaagcatgcgttttttagtccccactttacaagtcacagtgacggttctccagtgtagagtagattgattgccctgtgtccttcaggcagggtgcagtagtaagt

SEQ ID NO: 1310 - DNA, 601 bp, Human
ggaaggaaaagcaccgtgaaaatgttaacgatggttagaaggtgggctctgctggtgacagacagagccttgatatcacctgttggttggtcacctgcttccccaaggccacgccctgcagccttctccttgaccatcccagccctgctgatgttccttgtgatttcacaatggagtacttatataaaattggtaactgctttccgggaaattgacttcccttccccttgtcctgaaaactcaggcatgggcatatttcttggagattttctagttgaatcagaacttcctcttggtttgygtagattccatttagacctgcattgtccagtgtggtagccgcttattgagtaagccacgtggcttattgagtacttgaactgtggcttgtccgaattgggactgctttaggtgtaaaatatacactagatttccaagacatagtatagcaaaaactctgtacaccatttcattaataattactatgttgataacatgttgaaatataacattttggatatattagattaagtaaaatgtgttcttaaatttcacctgcctgtttcctttttattcttttttttttttttttgaggcggag

SEQ ID NO: 1311 - DNA, 601 bp, Human
cttggtttgcgtagattccatttagacctgcattgtccagtgtggtagccgcttattgagtaagccacgtggcttattgagtacttgaactgtggcttgtccgaattgggactgctttaggtgtaaaatatacactagatttccaagacatagtatagcaaaaactctgtacaccatttcattaataattactatgttgataacatgttgaaatataacattttggatatattagattaagtaaaatgtgttcttaaatttcacctgcctgtttcctttttattcttttttttttttttttgaggcggagtttcgctctcatcacccaggctggagtgcagcggcgcgatctcagctcactgcaacctccgtctcctgggttcaagcgattctcttgcctcagcctcccaagtagctggaattacaagcatgtgccaccatgcccgtctaatttttgtattttaactggagacggggtttcaccaccatgttggccaggctggtctcaaactcctgacctcagatgatccgcccgcctcagcctcccaaagtgttaggattacaggtgtgagccaccatgcccgactctttttaattctta

SEQ ID NO: 1312 - DNA, 601 bp, Human
tattgagtaagccacgtggcttattgagtacttgaactgtggcttgtccgaattgggactgctttaggtgtaaaatatacactagatttccaagacatagtatagcaaaaactctgtacaccatttcattaataattactatgttgataacatgttgaaatataacattttggatatattagattaagtaaaatgtgttcttaaatttcacctgcctgtttcctttttattcttttttttttttttttgaggcggagtttcgctctcatcacccaggctggagtgcagcggcgcgatctcrgctcactgcaacctccgtctcctgggttcaagcgattctcttgcctcagcctcccaagtagctggaattacaagcatgtgccaccatgcccgtctaatttttgtattttaactggagacggggtttcaccaccatgttggccaggctggtctcaaactcctgacctcagatgatccgcccgcctcagcctcccaaagtgttaggattacaggtgtgagccaccatgcccgactctttttaattcttaatgtggctacttgaaaatttaaaattacagatgtggcttgcattctgtgttgg

SEQ ID NO: 1313 - DNA, 601 bp, Human
ttcttttttttttttttttgaggcggagtttcgctctcatcacccaggctggagtgcagcggcgcgatctcagctcactgcaacctccgtctcctgggttcaagcgattctcttgcctcagcctcccaagtagctggaattacaagcatgtgccaccatgcccgtctaatttttgtattttaactggagacggggtttcaccaccatgttggccaggctggtctcaaactcctgacctcagatgatccgcccgcctcagcctcccaaagtgttaggattacaggtgtgagccaccatgccygactctttttaattcttaatgtggctacttgaaaatttaaaattacagatgtggcttgcattctgtgttggtaagctgctttagagcatttcttttaacaccaggagttcttcccctcatcatctttttggctgagtcgtcactgcagcgctcatagccccgcatgtacctctccagccagaacccttaggaatcatttggggagctccatgaagggcattgagtccaggcagaatggctaccttgagttcaacataagcattaagatggccattcgaaaacattaagcacagaagaatc

SEQ ID NO: 1314 - DNA, 601 bp, Human
ccatgtgccactccctcccgcctgcctgctgtgtccttggccccagtggtgctctcccgtgctgaccagccggcacggctcacctggccgaactctagccttgccttttcctctcaaggatgtaaaggctctgcagatttcgggaggcctgtctcccagcacctgatgggacactttttgccccactgtaaattctgggtgtatcctccactgtatgctgtcaccccaagggcaagcactgcatctgcttagtgaaggatttattgttcggaagatacattttccccttgagcagagagtrgcgtatcctggcagtcttcggtgagccagttgtaccaggattatgaaatgcagatgtttactgtgtcattgttgctgtcattgctactgaggagtactgaccagaatcatctgcaactcttagttggcagagaggaccactatggcgggtagctcttttctttcctgccattgtggggatgattccaggccaaagatgatggagaagtatggaaatcatctgaaaggttgaagcttggcacgtgaagccattcatgactttgtaaggcagttttgctgaaggccagttctgccctgggag

SEQ ID NO: 1315 - DNA, 601 bp, Human
gatggagaagtatggaaatcatctgaaaggttgaagcttggcacgtgaagccattcatgactttgtaaggcagttttgctgaaggccagttctgccctgggagggacggaggtgaatcctcctgagtacctgtggttttcttacttcctgctgaatttacctaagtgcctgttgtttgcttgctgtggaggctttctggtatttcatttcaggtgcagatgccttcactttcccacaaaaaaaaccccaacaaaacctaagaccttactgcaactaagtctccaagtactttttaacccawtgggatgaacagcctgtggtctgctcagatcaccctgagtgcgtgtgagaaggcctgggctttgccaggaaatccaggaaggcagggccgggctgtgttggaagctggcttagctggtggggcagccttatttcaattaaaagggcattgactgggagcagcagtcctggagtttgttgcatttcctattgccctcaaaatgagaaaccaggaaaatagcagattggagccttcgagaaggcagtaaatggctgtttttattgacaaaaggaaaacattttactgccatctcactgatgg

SEQ ID NO: 1316 - DNA, 601 bp, Human
ctggtttcttcctgtgcttgaaaagcctctttctttgttgcgttaatacctctgtcttgctttcctcatgtgtatgccagtgtgacattctcggcagagtggggatgacgtggagcgtgtgggcccgtggttaatcttgtcctgaattgccttgctcaacttgcgtgtatagggtggttcaaaagttaagtttggctggtggtgaagttggaagcatcacttagaaacacgcctcctttgggcatatggtgtgaatcagggactctggctataaaaggtggggtctctgagcaccatcctrgttggaatgttcccctgacttggaggtagcgagagacagccaaggtgtttgttccagggaggctggtgggtgggagatgggatttttctgtctgtggcacaggcagtattaagtagagcaggctgtttaaatcacattttaagtaaaaaccaaagtgcacagatgatctgcagaacttctgggggataagaagctgctttcctcgaagaagttcacctccaaaccagcgcccatggctcagcagccagcatggcagccccaggggtacatgggacttgggcatgtgaggctggtgaggga

SEQ ID NO: 1317 - DNA, 601 bp, Human
gtggtctgctctgagaagatttcttgcttcctgatctgcctgtgtgttcgtgttgcttggtctctctctctgtctctctctctctcctctttgatcctagtacatacaggcaaggtatgcagcatttaaaatgttcataactcatcaaatggcacactgatcatcatgtataatttgggaatcagggtttaagaaatttagagatcatttatatggaagaaggaaccccaagtagaaacccaaaatctagaccattctgggttctaatctgtacctgccactggctaacatatggctttaagctggatgttacaatgagagctggagtttcgtctgattgcacatagccttgcttttctgtctttggaaaagtagctcactgcagagccctggtaaacgtttgaactgcattgcgggagtaggcagaagaacagaacagtccttggagcttggtaggaggtgtgagggcttatgggggacagttgtcttttcaagtcaaggaggaataagggcttctggggccggtggaaagggtgagtcttaggcagggaagggtgaccatccaggttagatcacttcttctgcggggtcagcttggccg

SEQ ID NO: 1318 - DNA, 601 bp, Human
tccccatggcatattaacagcgagatctgcaagaatacatcattttgtacagaacaggatgtatttcttttaaactacgttcctgtgtggacaagtggtatcatatgcaaaggtttaaggaccgttgatgccttgagatagtgccatctgtttgcctcaggtatgtggtgctaggacaaagctgccagacctcaccttccttcagtgagacaggaataggacagtatttgaaaagcatctaacatgtttccaagcacataggtttttggtaaatggtggcagctgctgctattttttttttaaattaaactatctaagagttgcattctgagaccatctaaaattctgagtcttaagctgtgttgactatatatgttcactaccataactaaatggtccttctgtattgcttttctaaattgtagaatttcaattattgtaaatagcgggccatactgtaggtgtggttcttgctaatttgattcgtactgttcaaattcttgtgtctgtccagataaactgtatctttacagaacattcagcgaggtacatatgtctatatcggggtgccagtggagtcaccctagtcatatgtaaactc

SEQ ID NO: 1319 - DNA, 601 bp, Human
catgtcatgatttttgtgaagcgaggacttggggtcccaagtctaggttttaggttccctgctgtaacccgtggccaccgagagagagttttatgataaaatgtcagcaaagtacctgacaacgtctcacgctagaatgagtttcgtacatgtttagttccctctctttttattccacgctcccccaccccaactttaaatcagaaacgtgagggtgctgattgaagctttttataacttttcttattgagaattgttctctggagttgtctccaagaacaaaggaattccagacgttctycttctctccttgtctcttctgtcctccagtcaaagaaaaactctgcatatgatctttggcctggagaaatattaaatctatgttaagtatgcagacatgaatgggcaaatgaaggatttgtggcaaagaagatctgccgaaacaaataagtcatgtaaatgggcagagggaaatattaaattgattgcatctttcagctcctggtacttaatgcaaagataaagtagtgggaaaaggttgtcatttgaaataatggaaagatgagggagttttgaagctagctgggatttttctgcctgt

SEQ ID NO: 1320 - DNA, 601 bp, Human
aatattttgagaaaatggaaataattaaatttacatttcttctaggactttattttgttatcctttaaggttattgtaaatgaggagacttttgaactcacagactaaagcaaactacaccagataatcattaactttttctattgtgtgccacccttcccaaccagattgttccatagtatcacttatgaaccaagaacctgtgagcttgcaaaacgcatttttaaggagtctcaacttttctgatttgtgttaaagtttaggtgtgggtcccagaaatgagtttcatggaggggagagsttgtctctctgggtgggtaatacaggggccactgggggctcactgtggctttctggcacagacagttatgaagcaggggttactaaagtgggagagagcagccagttctccagcagccccagtgagagctctcatggatctgcctattgcactggggtaggagccatcaccgtcagcttttctctggcccacagtgccattttctgattaagctgagacctctgtaatagacacgttgtcattttttcttgtgtctaaaagtttgcttgactgcagtgggtctccagctcagagcaggtc

SEQ ID NO: 1321 - DNA, 601 bp, Human
taaggttattgtaaatgaggagacttttgaactcacagactaaagcaaactacaccagataatcattaactttttctattgtgtgccacccttcccaaccagattgttccatagtatcacttatgaaccaagaacctgtgagcttgcaaaacgcatttttaaggagtctcaacttttctgatttgtgttaaagtttaggtgtgggtcccagaaatgagtttcatggaggggagagcttgtctctctgggtgggtaatacaggggccactgggggctcactgtggctttctggcacagacakttatgaagcaggggttactaaagtgggagagagcagccagttctccagcagccccagtgagagctctcatggatctgcctattgcactggggtaggagccatcaccgtcagcttttctctggcccacagtgccattttctgattaagctgagacctctgtaatagacacgttgtcattttttcttgtgtctaaaagtttgcttgactgcagtgggtctccagctcagagcaggtctggctagagaaaacaggaggtgatgactggagcactttgcccttatggaacgtgctctgatgtag

SEQ ID NO: 1322 - DNA, 601 bp, Human
gaggagacttttgaactcacagactaaagcaaactacaccagataatcattaactttttctattgtgtgccacccttcccaaccagattgttccatagtatcacttatgaaccaagaacctgtgagcttgcaaaacgcatttttaaggagtctcaacttttctgatttgtgttaaagtttaggtgtgggtcccagaaatgagtttcatggaggggagagcttgtctctctgggtgggtaatacaggggccactgggggctcactgtggctttctggcacagacagttatgaagcaggggtkactaaagtgggagagagcagccagttctccagcagccccagtgagagctctcatggatctgcctattgcactggggtaggagccatcaccgtcagcttttctctggcccacagtgccattttctgattaagctgagacctctgtaatagacacgttgtcattttttcttgtgtctaaaagtttgcttgactgcagtgggtctccagctcagagcaggtctggctagagaaaacaggaggtgatgactggagcactttgcccttatggaacgtgctctgatgtagaaagcaagaggatttt

SEQ ID NO: 1323 - DNA, 601 bp, Human
cactgaaggtaccttgtgtacacagaaagaagacagagggagccccggatgcctcggtatccctcagagccggatccttcagacctgtgcagtacctgtggatttggttagtcgatgatgcgctgccattaaaacaaaggcatcggccctggaatagagaagttcagtgagaacctctgtactccatgggcattttctaggaaataatttcacctgccctgtgtaattctctggaagaatcacagtgagttggaaggaaacttaagacttggaaaaggattgagaggttagcccagaccayaccagggctctgaaggcccagctggggttagaacctgggacaccctccagcccactgtctcctgttccctggccatttactgccccactcccctttctactctcaggggccctggatctaatgaggggattcgtgcagtttgctgcactaatacattgcaagtggtgccaacctaaaggtattctgatggtggaatcagagcagtagcatcttattaggtcagaatctgtatctcctcttccaagatttttacatgatttagtgttttctgaattggaaaaaaacaaaaacaaaaacaca

SEQ ID NO: 1324 - DNA, 601 bp, Human
gatgaagatccttgtaccagtgaactgaccccactccccgtctggattcctgtggtgattaccctctgtattagtctgttttcatgctgctgataaagacgtacccaagactgtgaagaaaaagaggttttaattggacttacaattccacatggctggggaggcctcagaatcatggcaggaggcaaaaggtacttcttacatggtggcagcaagagaaaatgtggaagaagcaaaagtggaaaccctgataaacccatcagatctcgtcagacttattcactatcatgagaatagcacrggaaagaccagccctcatgattcaattacctcacctgggtccttcccataacacatgaaaattctgggagacacaattcaagttgagatttgggcggggacacagccaaatcatatcaccctcttagcaaggactgtgttcgtgatcatgactggcattcactgaacaatgactaggtgccaggcacctcgccagtattctttaatctttgcacagtctgtagggtggatatggatattactgttccattttttgtggaagaggaaatggaggcaagagacctgattataacttgtgcaa

SEQ ID NO: 1325 - DNA, 601 bp, Human
tggattcctgtggtgattaccctctgtattagtctgttttcatgctgctgataaagacgtacccaagactgtgaagaaaaagaggttttaattggacttacaattccacatggctggggaggcctcagaatcatggcaggaggcaaaaggtacttcttacatggtggcagcaagagaaaatgtggaagaagcaaaagtggaaaccctgataaacccatcagatctcgtcagacttattcactatcatgagaatagcacaggaaagaccagccctcatgattcaattacctcacctgggtcyttcccataacacatgaaaattctgggagacacaattcaagttgagatttgggcggggacacagccaaatcatatcaccctcttagcaaggactgtgttcgtgatcatgactggcattcactgaacaatgactaggtgccaggcacctcgccagtattctttaatctttgcacagtctgtagggtggatatggatattactgttccattttttgtggaagaggaaatggaggcaagagacctgattataacttgtgcaaggtgccatgcagctaagcagccagcccaaatccagacctgct

SEQ ID NO: 1326 - DNA, 601 bp, Human
tctgtaagtttttaagtggcttcctttcctctggtggagaagccagcacctttatcctatgacaagaaagctctttgtagtaggtggtagtagaatcagacagatctggcttaaaatcttggctgtgctacctcttggctctgcacattggtgaagagaatttaccttcctaaggcctctcagctacacgactgtggacactcagcttccttctaaggtcgttgtgagaggtaaagaaaaggggttagtccagggccagacatggcacaatgcctcaatgaaatattagctgatactatcrtaatttttaaattcccataggactcactgttaaaggattacaaggctgacacaaaaaatactgcattttgaatttgtgtctgatttatacatttccaaagagtggaattctcactacaacagctgttctttgaaaggttagatctttgttctgagataaattaagtggaaaaaggtgtagagcattatatgtactctgattcttcagggcttaatttaaaaagagcatgtttgctggtgaatgctggttcaatcattaagaagtttttgagaaggaatcccagaaagtaataagcactta

SEQ ID NO: 1327 - DNA, 601 bp, Human
tgtgtctgatttatacatttccaaagagtggaattctcactacaacagctgttctttgaaaggttagatctttgttctgagataaattaagtggaaaaaggtgtagagcattatatgtactctgattcttcagggcttaatttaaaaagagcatgtttgctggtgaatgctggttcaatcattaagaagtttttgagaaggaatcccagaaagtaataagcacttatttttcatggaaaggaaccggaagtgcttggtgacctccacaggtaatcttgtattatttttgcactgtttggarttttttaaccatgtgcttttatttcttctattcttttcaaaggtcagtaggtgttatctggacaatagggttctggtctgttttctgttttcttcattgtactgtgcattaagaaaaaccctaatgtgcttttttttttttttaagtgaacctttccacatctcattgtccttcagtgagagcaggctgtgtgtgtggtcttggtgaactgtcccgttccctggagacagtatctgggggcctccctgcccttcccagtaagagctgggccttcacaggaatagaggcctaggattcgcc

SEQ ID NO: 1328 - DNA, 601 bp, Human
aaaaagagcatgtttgctggtgaatgctggttcaatcattaagaagtttttgagaaggaatcccagaaagtaataagcacttatttttcatggaaaggaaccggaagtgcttggtgacctccacaggtaatcttgtattatttttgcactgtttggaattttttaaccatgtgcttttatttcttctattcttttcaaaggtcagtaggtgttatctggacaatagggttctggtctgttttctgttttcttcattgtactgtgcattaagaaaaaccctaatgtgcttttttttttttttaagtgaacctttccacatctcattgtccttcagtgagagcaggctgtgtgtgtggtcttggtgaactgtcccgttccctggagacagtatctgggggcctccctgcccttcccagtaagagctgggccttcacaggaatagaggcctaggattcgccttcatcctcttgaagagccctaacagtaggtcctggctggggtctggcatagaatgcccttggcacgatgtgtgtgagtgtgtctttccttagtaaatggccttgaaaatgccatgtgcttctggcaggcctggataaggttt

SEQ ID NO: 1329 - DNA, 601 bp, Human
ggttctggtctgttttctgttttcttcattgtactgtgcattaagaaaaaccctaatgtgcttttttttttttttaagtgaacctttccacatctcattgtccttcagtgagagcaggctgtgtgtgtggtcttggtgaactgtcccgttccctggagacagtatctgggggcctccctgcccttcccagtaagagctgggccttcacaggaatagaggcctaggattcgccttcatcctcttgaagagccctaacagtaggtcctggctggggtctggcatagaatgcccttggcacgaygtgtgtgagtgtgtctttccttagtaaatggccttgaaaatgccatgtgcttctggcaggcctggataaggtttgccctgcataacccttggaaagcacagttctcacttgtaacaccctgtctgcaggtccatgatattgtaattaaaaagttatgggatcacaagggcctatttaaagggcatctggtctaaaggcacagttaaaagcagaatttgtgtcagtggctcccttaatttctcaaatatggttctgtttctaaattcatcccactggatgtctgtgttgagttttctgttg

SEQ ID NO: 1330 - DNA, 601 bp, Human
agaaaaaccctaatgtgcttttttttttttttaagtgaacctttccacatctcattgtccttcagtgagagcaggctgtgtgtgtggtcttggtgaactgtcccgttccctggagacagtatctgggggcctccctgcccttcccagtaagagctgggccttcacaggaatagaggcctaggattcgccttcatcctcttgaagagccctaacagtaggtcctggctggggtctggcatagaatgcccttggcacgatgtgtgtgagtgtgtctttccttagtaaatggccttgaaaatgycatgtgcttctggcaggcctggataaggtttgccctgcataacccttggaaagcacagttctcacttgtaacaccctgtctgcaggtccatgatattgtaattaaaaagttatgggatcacaagggcctatttaaagggcatctggtctaaaggcacagttaaaagcagaatttgtgtcagtggctcccttaatttctcaaatatggttctgtttctaaattcatcccactggatgtctgtgttgagttttctgttgatgaaagaatgtttaaaaatgaggcagatccaaattctaatgt

SEQ ID NO: 1331 - DNA, 601 bp, Human
aggagaaaatgtggatattcaagaaagagggtcgcaaaatagcaaacacccactatggctgggcagtacagggttgcagaaatatattttgatgtgtgatcgcattggagctacttcaaagagcaaacacaccactttgatttatttctcttagtgatacagtatttagagagggagatactttttatcttcatgggatacttacagtggtgctctagaagccatgtactgcttctggcttctccttcctttcctccaaggctcctcctgcctcctcccaaagctctgtgccctgaaagakccttgagccattgctcagatgtcaaaattgtattaagcagacacatcaaattaaaacttttgggatcactcaccaatatggtttcctgtacagtactgccctgaggggggattacaagtagttatgcatccatttcattgatgtatcatttttattaaaaagaaaaacaatccaaccaagagaggaagtgtagccagctgcctaaagagtggcgatgatgggagatgatattttgattacattaatccatatcctgttagttcactttgcttctgtcgctgctgctggtgaagttactaa

SEQ ID NO: 1332 - DNA, 601 bp, Human
gggactgttggtgtcaggcacacaccaccttgcctagcttgaagatctttcttctaaatgagcgggctttaaagtgatcagtgggacctgggcaggttggctcttgcctataatccaagtgctttgagagaccgagacaggaacatcacttgagcccaggagttcgaggctaaagtgagctgtgagcacaccagtgcaccccagcctgggcaacagagtgagactctgccccaaagcaagataaaattatcccacaggattttagtcctgacttgtgtattactatgcagttgtgtctgtstgaggctcagattcccccccatttaggatttgtgtggctaaatctcagatctcattttcaggtgaatttctctattaaggttataaaagaccaaaataactggaaattcaactctgtacttgaatacttggtaatgcccagcattctcttgactatcccatttcacagtttgccggtcatttccccagtgtactcactggattcttcccgcagccatgaaaggtaggtataattaactccagtttacattcaggacaatagaatgttcgtcaaaatgcttttgcacatgttttctcaccc

SEQ ID NO: 1333 - DNA, 601 bp, Human
tggttcacctgacattcagctgggttgggggagaacctctttaaacatcagatcttattccggaggagtgtatccagccttctcacagcatatcctgttaaatatctgttcaaggttagcctaggcctggagtatggacagcatgaagccagatctaaaacagatcagttcatggataaatgatgaatttaataaaatttgaaaataaaccccacataactagtgctgctattgatcattcatatagccagcaggagtggtgagaggcttggtctgcctgaggtgtggagatgcttgtggyggggggcaaggtggacgagggctggggctgctcctggagcatctttacgcgggtggaggagctctgacacagtggcagtgtttgtaacactttccaaagggattaaaataattctgtagagttaaccctaggctagtgtggcttgatctgaaacagtcccagccagaaggtaagaactcctgtgttatgttgttagcatacaatttgctgaagttcacattttaaattttatatttaaaaaccaaaaagtagtactgatcattttggactgtttcaaagtgatattgtttttacttgtta

SEQ ID NO: 1334 - DNA, 601 bp, Human
ctcacaatgggccggatgtggtggcttacacctgtaatcctagcactttgggaggctgaggcgggtggatcacctgaggtcagaagtttgacaccaacatggtgaaaccccgtctctactaaaaatacaagaattagccaggcttggtggtgggtgcctgtaatcccagcttctcgggaggctgagacaggagaatcacttgaacctgggaggaggaggttgcagtgagccaagattgtgtcattgcactccagcgagtgcagtgtaaatcccttaaggaaacagtgtgttgtggtaatcrtgatatcatagtaaataggttttgttcgttatttttttcttttacttccttttctaccagtgactagtcctaatgtgttctaacttttgaaaataaagtacaaattagatggatttaaacatacgggaagtaagacggaaattcattacttttaaaaaacaatttgttgtggataagatttagaaatggaaacacaataaactgtgtttccatgacacaggtatactaccaagttcttacaatgtacctttgaggtaacgaattttcatgtcatttggagtagggctgggccagtgagtc

SEQ ID NO: 1335 - DNA, 601 bp, Human
tggcttggatgacaactatggcaatgcccattactgagctaggagatgctggaggaagatcaggtggggactgtgagcatgagtttgatttttgcagatactgggtttgagacacttctgagtcaagcaggcatttggaaatgtggactggtgccgagaaggaattcccagcagtgacttggtttaggtggtcctggaaagtagaaacacacacgagataattctggggatggagcttaaagggacgtcagcgttcaagggccaggtagaggatcatgagctgtaaagggacccaggtggytccagcacagcgaggaaagcatgcgagtgtgatggccaggcttccagggagagaggagggttttaaggagaacaacgtgctaaaagccactaagaagccaagcagagtgagaaatgaagacctccactgggtcttgcaagaggggaggcctttgaggacctcacctgagagctgatgaatgaagtgatggctggaagcagctctggagagggaggaatactgtggggaggggaggaactgaagaagtagagaagcatggctgtgcacaggggaggtgggatggcagccagggaggagcag

SEQ ID NO: 1336 - DNA, 601 bp, Human
tcggcctcccaaagtgctgggattacagccactgtgccctggcactactcaatttgtaataaatcagggtaagttatttttggtgccaagtcgattaattgaatataggttattttgcatcttagattccctctgacgactaaatcttataagcagaggtatgtgagcatgagaactgtgtcgggtggtcctgaagagattagtggattagaaggagatttggagatttttaaaaaagcctctggacagtgagttaaatggtgggttgacactctgtggtcgggactttttggagagtctrtaaagttctgctgtatttctcaagagctagagagagatgatactatgaccaaatttggtttgaatgtattataatgtactgagtatcactaatttgttgggaaatgactgttaaaaatacttactgacgcttaaaaatatcacctatagcattagtataagtagccaactgatttacatatatttcatgtgtgtgttgggagaggggtgtggattcgttaggccaaagatttcggtaatatatttggaagagataaatgaagataaagagataaattaccttttgaataattccaaaact

SEQ ID NO: 1337 - DNA, 601 bp, Human
tttcatttttctaagtttccattagctatcatggcctcacttgttatttcataatgaatggttacaaattgtttgtgtgtttttgtaattagaatgtaatagcaatcgtctaccagatgagctgacattgtaatgacatgaagtcagtaacaattatgccttacaggaaaattaattctgtaatcctatcatcccatattttgcctaagagattcgatttggctgctgctaggctgcttaggcaggtgacagcatggtgggacacttctcatttttctggttagactacttaaccataacrttcatggtgccacctgaaaaaataattttatcgttttagacttttaaaatatttttaggctttttttttttttggcttaaaaaaagaatctgttctacttgggtattttgttctccttatttcttagtgaacaaagatatttgctcgacttctatcccagaaggaccatcctttcttcttccttttccttacctctaagggatatgaagctgtgagagggaattgcatatagcaataccattttgattccagtgaaagttcttacctttctcttttgtcattctcaacctcttacctgaa

SEQ ID NO: 1338 - DNA, 601 bp, Human
ttacaaattgtttgtgtgtttttgtaattagaatgtaatagcaatcgtctaccagatgagctgacattgtaatgacatgaagtcagtaacaattatgccttacaggaaaattaattctgtaatcctatcatcccatattttgcctaagagattcgatttggctgctgctaggctgcttaggcaggtgacagcatggtgggacacttctcatttttctggttagactacttaaccataacattcatggtgccacctgaaaaaataattttatcgttttagacttttaaaatatttttaggctttttttttttttggcttaaaaaaagaatctgttctacttgggtattttgttctccttatttcttagtgaacaaagatatttgctcgacttctatcccagaaggaccatcctttcttcttccttttccttacctctaagggatatgaagctgtgagagggaattgcatatagcaataccattttgattccagtgaaagttcttacctttctcttttgtcattctcaacctcttacctgaagagtccattccctcagtatatagagcatctggaagtctaaggtgcaggcaggactgaaaga

SEQ ID NO: 1339 - DNA, 601 bp, Human
acccaggttggagtgcaatggcgtgatcactactcactgcagcctctacctactcaggctcaggtgatcctcttcacctcagcctcccgagtagctgggactacaggtgtacaccaccatggccagctaatttttgtgttttttttgtagagacagggtttcatcatgttgcccaggctcatctcaaactcctggcctcaagtgatccacccacctcggcctcccaaagtcctgggattacaggcgtgagccatcatgcccggccttcttctagatgtttaaaacaaacacattttagtgyagttgagcctctgatcgttacatgtttatttcctagcatttaaaagcctttcagcgacatacactccttattagcttaattttttcttttaagagccgtgttcttgctctgtcacccaggctggggtgcagtggtaccatcgtaactcactgaagccttgagctcctggcttaagtgctcttcccaccttaaccttctgattaactaggattacaggtgtgcatcaccacgcccaggtaatttctaaaaaaaaaagttttttgtagaagtgatgcctcgccatgttgcccaggtgtctgt

SEQ ID NO: 1340 - DNA, 601 bp, Human
ggactacaggtgtacaccaccatggccagctaatttttgtgttttttttgtagagacagggtttcatcatgttgcccaggctcatctcaaactcctggcctcaagtgatccacccacctcggcctcccaaagtcctgggattacaggcgtgagccatcatgcccggccttcttctagatgtttaaaacaaacacattttagtgtagttgagcctctgatcgttacatgtttatttcctagcatttaaaagcctttcagcgacatacactccttattagcttaattttttcttttaagagcygtgttcttgctctgtcacccaggctggggtgcagtggtaccatcgtaactcactgaagccttgagctcctggcttaagtgctcttcccaccttaaccttctgattaactaggattacaggtgtgcatcaccacgcccaggtaatttctaaaaaaaaaagttttttgtagaagtgatgcctcgccatgttgcccaggtgtctgtcttgaatgcctggcttcaagcgatcctctcccctcaactctcaaaaggctgtaaccctgattttaatggtagtgtaaagtgacatgggatgaaggaa

SEQ ID NO: 1341 - DNA, 601 bp, Human
ggttcctctgtgcagacttgtagacagtatgggttctttgcgtgctgagttgaggtggccccaaacctttcagacagttgctcagatacctggcagttgctcatttacccttccagaccttcctgcctctatattagccaatgacaagcagatgctttccacaaaacattcgtgtgtgaactgttgacatttatgactgttttctgagcccacaccaggtcatttttctataaaatcagaactgtgagagctcagggcatgtggccatcctggataatgggtcctgctgtctggggagtcrttttcatcaaaattcacttttaaagaatagagtgtttattaacgaaaatatgtgagccttggctgggcactgtggctcctgcctgtaatcccagcactttgggaggccgaggcgggtggatcacaaggccaggagatcgagaccatcctaacgcggtgaaaccccgtctctactaaaaatacaaaaaaaaagttagctgggcgtggtggcgggcacctgtaatcccagctactctggacgctgaggcaggagaatggcatgaacccgggaggcggagcttgcagtgagcggagattgtgc

SEQ ID NO: 1342 - DNA, 601 bp, Human
ctcagatacctggcagttgctcatttacccttccagaccttcctgcctctatattagccaatgacaagcagatgctttccacaaaacattcgtgtgtgaactgttgacatttatgactgttttctgagcccacaccaggtcatttttctataaaatcagaactgtgagagctcagggcatgtggccatcctggataatgggtcctgctgtctggggagtcgttttcatcaaaattcacttttaaagaatagagtgtttattaacgaaaatatgtgagccttggctgggcactgtggctccygcctgtaatcccagcactttgggaggccgaggcgggtggatcacaaggccaggagatcgagaccatcctaacgcggtgaaaccccgtctctactaaaaatacaaaaaaaaagttagctgggcgtggtggcgggcacctgtaatcccagctactctggacgctgaggcaggagaatggcatgaacccgggaggcggagcttgcagtgagcggagattgtgccacttgcactccagcctgggcgacagagcgagactccgtctcaaagaaaaaaaaaaaagaaagtatgtgagccttatccc

SEQ ID NO: 1343 - DNA, 601 bp, Human
ggatcagtatcaggatcgggaggtaaccaggtctccaagttttccctttcgtttttcttttctgcttttaatgagccttaattaatccagggagctaggctgcagtatctgtggctctccctgatgttttctttctgcatttctgtcttggaggggaacctgaggatttggaagtagagggctctactagtgcttcctttttgtccttttctcattgtccaaaagagtcttaagcgatctccaggaaatcccctgctcctgccaggaatctgcctgtgagtatttgagtgagttgctgctytttaagtaccagttgagaagctgaaggttggtgttgtggttgtgataaactcccaacatgaaaactgaggaccaccagcgttttcagctcacctttgactcacgctggcagctccaggaacactgaacaggagtccccactgaacctttgctgcgttccgaagcagcacagccatggttaggcactgccaggcagctcttggaaaccacagggagggaagttttggttccttctttctgtctttgtttttgagaggaatgagcttggaataaaagaacgctagtaatgactgatttgcag

SEQ ID NO: 1344 - DNA, 601 bp, Human
tcactttttccattcctttaagtttattaagttgaatgcctgtctcatttgctttttagtcttcttaaaataatggcatttaaggctatacattttctttgaaaattgcttttgttacgtatttttggttttagacagttgatctcctttttgttgttttctagatggtttgtaattaaaatatttatttgatctttgattctgacattacttagaagtatgtctgtccttgaatttttcttttgcttaccttttgatattgtttatatgatttatgaatgcagctctgaggtatctgagrggatttattaacgtttacttgcgtccaagtacatgattaagttttaattgctttgtggacattaaaaaattatgcccttggtaaaatgcaaaggttttattttctgtatttagtaaatcaaacttactgattgcattatagtcagatcttccaaattcatgtatgttttcagttgtcaaattgacagttaatgatgcaccttttataatttttttttttgagacagagtttcactctgtcgcccaggctgtgtagtgcagtggcgtgatcttggctcactgcagcctctgtctcctggat

SEQ ID NO: 1345 - DNA, 601 bp, Human
tatcagtacttcatccctttttatgggtgaataatagtccattgtatccagttgtatccagaagatttgcttttcattgcctaacttcagggcttcagacacctcaatctttgttctgagatggatgtaaacttaatgtatatctctctctctcacccaatgatcatgccaacaccttttttttttttttttttttttttgagacagtctcgctgtgttgcccaggctggggtgcagtcttggttcactgcaacctctgcctcccaggttcaagtgattcttgtgcctcagcctcccaagyagctggggccacaggtgtgagccaccacacctggctaatttttttttcttttctcttttttgtttttgtagagatggagtgttgccatgttggccaggctcgtctcgaactcctggcatcaagtgatctgcccgcttcagcctcccaaagtgctgggattacagacataagccaccttgcctggccatgccaacaataattatttagaagtatgttgagaatacatcccaataatagaagtgaaagctctttaaaaagaaaaatattcaaaacttaccagctgatcttatgtttcattta

SEQ ID NO: 1346 - DNA, 601 bp, Human
gatttgcttttcattgcctaacttcagggcttcagacacctcaatctttgttctgagatggatgtaaacttaatgtatatctctctctctcacccaatgatcatgccaacaccttttttttttttttttttttttttgagacagtctcgctgtgttgcccaggctggggtgcagtcttggttcactgcaacctctgcctcccaggttcaagtgattcttgtgcctcagcctcccaagcagctggggccacaggtgtgagccaccacacctggctaatttttttttcttttctcttttttgkttttgtagagatggagtgttgccatgttggccaggctcgtctcgaactcctggcatcaagtgatctgcccgcttcagcctcccaaagtgctgggattacagacataagccaccttgcctggccatgccaacaataattatttagaagtatgttgagaatacatcccaataatagaagtgaaagctctttaaaaagaaaaatattcaaaacttaccagctgatcttatgtttcatttagaatggctgcattctttgcagtaccctagggttgtagaaattctcccccatgattgcacaacc

SEQ ID NO: 1347 - DNA, 601 bp, Human
ctctttaaaaagaaaaatattcaaaacttaccagctgatcttatgtttcatttagaatggctgcattctttgcagtaccctagggttgtagaaattctcccccatgattgcacaacccactccttctcagccagtgtgcacctggagtcagctgtgtttggccttaaggtgtccatggtccagcagggagagggcagatgggtcagtgttgtcctgctagtgatgagtatcccatggtgggcatgctgatgccacgcaagggagagggtgtctggttctgtgcagtggcagtggtgcaacyccttaccaaggtaccgtggggacctgggttagggcaggaggaggaaggtgttctctacagactgcagggcttggaggcagcctgtcatggggaagggtgtggatgaagggtgagccgggaccccaggcaggtacggagcagttcaaggccgtcaagtgtgcttcattcttcagtcattagggtgtctctgaaaggtttttcattgaatcagaattcccctaattcacgaattctaaagcttaagtaaattcagtaataataaactgtcaattatccaagcgatgaatataaatccataag

SEQ ID NO: 1348 - DNA, 601 bp, Human
cccccatgattgcacaacccactccttctcagccagtgtgcacctggagtcagctgtgtttggccttaaggtgtccatggtccagcagggagagggcagatgggtcagtgttgtcctgctagtgatgagtatcccatggtgggcatgctgatgccacgcaagggagagggtgtctggttctgtgcagtggcagtggtgcaaccccttaccaaggtaccgtggggacctgggttagggcaggaggaggaaggtgttctctacagactgcagggcttggaggcagcctgtcatggggaagggygtggatgaagggtgagccgggaccccaggcaggtacggagcagttcaaggccgtcaagtgtgcttcattcttcagtcattagggtgtctctgaaaggtttttcattgaatcagaattcccctaattcacgaattctaaagcttaagtaaattcagtaataataaactgtcaattatccaagcgatgaatataaatccataaggtttttcaaatccccagaaatccctttcatctcccacctggttttgctgagcgcctgtctcttctgtctcttttctgattcccacctttcacttttcc

SEQ ID NO: 1349 - DNA, 601 bp, Human
catttctgtacctttgtggtatgtaccttgtggctaatttgtccatgaagggataggcattgtgttttgttgcttaagtcgcttaaggcctttaaagcatttccaaactcacctatttttgctctaaggggtataaggtgttaaaaaatgaatggaagttaactcattctcaccttgtctgctaacttccttttgttctttttctgtaagaactcataaagctgtatgcatcagctgctcccaggggccttctaaggcctcagtccaacaacagtgctacaggtgaggaaaggaaagaagrcactatgtcatcatgtcattcttttagacttggtaagaagtatattcaagcagatcagatgctctcagaatcacagcgtgttgtactgctagtaattaaaactgaagtccacgttgaataagaaataattttttattgattgctggcatttgtgagaaagggtttaattagaccaggatatggaggggacttatcgacagttccgttgtacattgttgacatggttattttctgtatctcattttgcctgggaatttgtcattctcttctattttcttatcagtagcactgcttttacac

SEQ ID NO: 1350 - DNA, 601 bp, Human
tatttttgctctaaggggtataaggtgttaaaaaatgaatggaagttaactcattctcaccttgtctgctaacttccttttgttctttttctgtaagaactcataaagctgtatgcatcagctgctcccaggggccttctaaggcctcagtccaacaacagtgctacaggtgaggaaaggaaagaaggcactatgtcatcatgtcattcttttagacttggtaagaagtatattcaagcagatcagatgctctcagaatcacagcgtgttgtactgctagtaattaaaactgaagtccacrttgaataagaaataattttttattgattgctggcatttgtgagaaagggtttaattagaccaggatatggaggggacttatcgacagttccgttgtacattgttgacatggttattttctgtatctcattttgcctgggaatttgtcattctcttctattttcttatcagtagcactgcttttacacttattagccctagctgtttgtcttgcttatttaaacttgtacatggcacatgctcaaagatttttccaggcaaaatttctttaaagcaggatttgagattttccatccccttc

SEQ ID NO: 1351 - DNA, 601 bp, Human
caccatgtcaaaattgtgtcaaaattcgtctgtatgcatttttcttggtagaagggtccccaaaagtcaccacattctcagagacttctgatccctaaaactttagatcaacagtcaataaaaaggtcccagttgtgtcttagtccccatggcagtacttttgaacatttaaaggtggagaattgctactgaggactttgttctgtggatgaaacttcgaatgaggattgttggtgagagttggattgttgttgtatgaggaagtgcaccttggaatctaatggggtcttcacggaggggragtcagttgtggcactgtttgtgtattccattcatcattcatccctccatccaagcacccacgtggagctcagaaagatgactaacacataccccctgctgctcctgtttttctaaggtgtgctgggaccatttacatttagttctttggagaacacaactacttaggatttttgttgttgttgttgttttcctgtacattgtcttcctatctcccttctggtacccattccaccctctctccccttcctcactgccgtttcataggggttctcagattcctgtgaataaagcaaaccga

SEQ ID NO: 1352 - DNA, 601 bp, Human
gaggaagtgcaccttggaatctaatggggtcttcacggagggggagtcagttgtggcactgtttgtgtattccattcatcattcatccctccatccaagcacccacgtggagctcagaaagatgactaacacataccccctgctgctcctgtttttctaaggtgtgctgggaccatttacatttagttctttggagaacacaactacttaggatttttgttgttgttgttgttttcctgtacattgtcttcctatctcccttctggtacccattccaccctctctccccttcctcactgcygtttcataggggttctcagattcctgtgaataaagcaaaccgatgtgcagatatgtgtgcttacacatgtggacgtatttgaggaggtaagagggacctgcacaaggctttagtgagtaagcagagaagttatttatatatagtgagacccagtaaacggcgatgtcgcaggtgaggcagttgatctggtcagaatatgcctccagagacatcactggtgaggcctgcatgcatgttgaaaagagtgtatcttacatctaggcttgggtttccccctgcagctcacttatgaataacaac

SEQ ID NO: 1353 - DNA, 601 bp, Human
agttaactactggtgatgattcttagctcatctgtggccaagtatagataagagaattagaaagttgtttccagcgtgtgaacttttatgattttcttccttggttactgtactcagttcttttttgttttgtttctatacaagatgagtagctggtggctcagatgacccccgtgctgcatgtacagtcccatccagagagtgttgggggctgtgtaaacctcgaggctcagagtggctgccattttcctaaaagagaagtatggctgctgttggcctcaatgttcagctttacaaaaaytcccgtaattaatgaaggtcaaggcatctgcaaacattaatggggtcacaagggacaaatcagttccttgaggggaagttaaaatgctagattgcttaccgctccagacaaggcattctcaagaagtatgtgcagtttcagcacaaggattaacacggagcattacttgagccatggggtgccttgggggacatggatcagcaaccatttccttttgctcacagcgcccagattttgttctggggaccactcttatctgcactgcatagcagccacacattttgagtgaaattaacccca

SEQ ID NO: 1354 - DNA, 601 bp, Human
agttcttttttgttttgtttctatacaagatgagtagctggtggctcagatgacccccgtgctgcatgtacagtcccatccagagagtgttgggggctgtgtaaacctcgaggctcagagtggctgccattttcctaaaagagaagtatggctgctgttggcctcaatgttcagctttacaaaaattcccgtaattaatgaaggtcaaggcatctgcaaacattaatggggtcacaagggacaaatcagttccttgaggggaagttaaaatgctagattgcttaccgctccagacaaggcrttctcaagaagtatgtgcagtttcagcacaaggattaacacggagcattacttgagccatggggtgccttgggggacatggatcagcaaccatttccttttgctcacagcgcccagattttgttctggggaccactcttatctgcactgcatagcagccacacattttgagtgaaattaaccccaactagcattcgagcgtcctcccctcccccaaaagatggactgtaccccacactgtaatcagcagggaggcatttcctggccacagttcaggttggtcccttagaacgctgctcag

SEQ ID NO: 1355 - DNA, 601 bp, Human
agctccagtaggtgtctgacgacatcttgtgatccggggggaagccagcctaaggacaaagccattgtggggtgagagacaggattggcacaatcactgacaaccgcagtagtagcccagaataaactgtgcctgaaacctaccctatttttgtattttttccagttttaaggaaataaatcccctttattgtatactcagtttgaatcaattatttttatctctttgggattggtttttggttaatctcagcaattcagaaatagctgaagaactatgctgtgggtttagacatcatgcygtgacaaaaagaagaggatcttagaagcgggggacattcactgaagctttatgagcctttcctgaatcccttcaaatcagatcaagttctctctctcctgtgcttagaaatgctgcctgttaagtcacgttggctacagcacccatctcagatcccttgtgattcagttgtaaagtagattcttctggtctgaattagaggccaaaacacaagacagatcaaaaatggggaacatattgcaaatttccccacaaaagactgaaggatgtgtttaccattgattgcacagggactgcagtg

SEQ ID NO: 1356 - DNA, 601 bp, Human
cctcctctcacctgaggccacagcggtgtgcaaggatgtggtctgtcttgagtgtgttttcaaagcagctgtttggtctgtgccttggatgtttttccacagataagcccaaaagagaaccacatcttaaaacgcccgtgaccttgaatggtctttccggaggggcggctggatttgtgctctcatcgtctcaggtatgtgtcaagccactgttgtttcagagctggacacaggtgcttaggaaaattcctcactgaagggttttcaggatttacaagttcttgctgtttttgtgaccttstgtggtttctggtttcacagaaggctttgtttcttggttcttgttgctgctttcagccttggcctgtaatcactgggcgccagggagggctgcggtctgtttcccggggtgtgctcagataccgtgtcagttcacatgtgttgctgcagcggcagggggccaggcaggaggggcgggtgtcctgaagcacgctcaatttgctgatcagggccttcacttggattttgcacttgccgcagtggagacattcctcgtagctactcagtgtggtttgttttaagtgggccatccgttaattca

SEQ ID NO: 1357 - DNA, 601 bp, Human
gccaaggttaaagttgagacgctgtttgttaaacctttcaaagagggaagaaggttgccttgaattcagttccagggtttgggagtctgagagggaggtggtgaggggcccggggaggccctgagaaacaaaatgctggttaaggacacagtctgctcaccgacctcggaagtctctagacgtctaaagaagtccaagcaaggaatgatgaccgaagaggaacctcaagggtgcaggcggctctgggatctcagcacatctcagtgatggaatgagctgccggggaatgacccctgtgggkgctgtccaaagtcagagcagacacaaacgtagctctccaggccccataccttggtgggcaagagggcagcaagtgcatcctcacagttgatggggagagcagcatttcagcctgcagaaaagagaaccacacagatgtaagatgaggtctgcactcacttgcctggtcatgcagagacggagctgggagcagctgcatgacttttcagagaagtggcacacgtttactgtaagggtcccaaatgtagaccactgcagatggtaaggtctagatggagggaccaatagtagggaagtaggg

SEQ ID NO: 1358 - DNA, 601 bp, Human
tataataaaaaaataaataaaataaaaaaagaaaaaagaaaacttattcctgtgtcaggcacttttctaagtgctttgcagtgtattgtctcatttaatagttgtttaaattaacagagtaggccgggtgtggtggctcacatctgtaatcccagtactttgggaggctgaggcgggtggatcacctgaggttgagagttcaagaccagcctgacaaacatggagaaacctcatctctactaaaaatacaaaattagccacagtggtggcgcatgcctgtaatcccagctactcaggaggmtgaggcaggagaatcgcttgaacccgggaggtggaggttgtggagagccaagattgcatcattgcactccagcttgggcaaaaagaatgaaactctgtctcaaaaaaaaaaaaaaaaaaaaaaaagagagtaaataaaattgtaaggtgaatatgttatctacttgatggaattttttaaactaccttgaaaagttttatagtttcctatttacagatgaaattaacatactaattataaatcatgcctcactattcactttaggcagtctatctccttaaggatctccttacggtttag

SEQ ID NO: 1359 - DNA, 601 bp, Human
caagctttgtctcttaaaaaacaaaacaaaacaaaatttagccgggagtcgtggcatacaattgtcatgtccacttctcaggaggctgaggtgggaggactacttgagcccaggaggtcaagactacagtgagccacatttgtgccgctgtactccagcctggatgacagagcgagaccctgtttcaaaataaagaaaaagagatttaaatgaagcgaaatgccattttctctaggtgagaaactggaatattatcaatgtcacttcttcccaaattgatttataatttaaaaacaatttyagtacttctgcagcttgtttggagcttgataaaatgattgtagagtttgtcttgaagctttaatagtgaggcaggtttaaaattgggggcaaaaaagaaatgggttttagggtgtagaagggacttgcctgatcacttttgctagaaataaatgtccctccaaattaaattactaatgtcgcacatcagatcgtatttaaatccattagaagattttactgttccattagagctacccatagctggtgaagactctgcttatagtggaacctagtttctcagttttccatttatatttat

SEQ ID NO: 1360 - DNA, 601 bp, Human
acaaatagtatcctcaactcagaaggaaagaattggaacactcagctggaggtgtctggtagggacatgtgtctgctttttgaatcagtcgtatatgtttttgttcctgtgcctggaggccctttgtggtgtgagaacattgaatttggagagggaaagggagacaaaagagaaatgggggtgatgcttaagggaaagtagggtttttagtttgttcaccacgcttgatggcagatttgcctctggatcctcaggccacgttcctatggtgggtagggatctctctctctctctctctctstctctgtgtgtgtgtgtgtgtgtgtgtgtgtgtgtgtgtaaatagtgatttctctaagttaataaagaatgtggggtgacctcctacacatgcccgtatgctattgtgtaggaacaaatgcatggtaggaatgggtagactctaatctgaaagcatcaagttgtatgcatcttctgcaattaggaatctgctcaccagcacgagtgctgtggtttctgtagttctgggattcagaggagcattttaaagatgtaggatgttggaggaggaggtgcagggatctccccttgggtaaagagt

SEQ ID NO: 1361 - DNA, 601 bp, Human
aaatagtatcctcaactcagaaggaaagaattggaacactcagctggaggtgtctggtagggacatgtgtctgctttttgaatcagtcgtatatgtttttgttcctgtgcctggaggccctttgtggtgtgagaacattgaatttggagagggaaagggagacaaaagagaaatgggggtgatgcttaagggaaagtagggtttttagtttgttcaccacgcttgatggcagatttgcctctggatcctcaggccacgttcctatggtgggtagggatctctctctctctctctctctctstctgtgtgtgtgtgtgtgtgtgtgtgtgtgtgtgtgtaaatagtgatttctctaagttaataaagaatgtggggtgacctcctacacatgcccgtatgctattgtgtaggaacaaatgcatggtaggaatgggtagactctaatctgaaagcatcaagttgtatgcatcttctgcaattaggaatctgctcaccagcacgagtgctgtggtttctgtagttctgggattcagaggagcattttaaagatgtaggatgttggaggaggaggtgcagggatctccccttgggtaaagagtgg

SEQ ID NO: 1362 - DNA, 601 bp, Human
atagtatcctcaactcagaaggaaagaattggaacactcagctggaggtgtctggtagggacatgtgtctgctttttgaatcagtcgtatatgtttttgttcctgtgcctggaggccctttgtggtgtgagaacattgaatttggagagggaaagggagacaaaagagaaatgggggtgatgcttaagggaaagtagggtttttagtttgttcaccacgcttgatggcagatttgcctctggatcctcaggccacgttcctatggtgggtagggatctctctctctctctctctctctctstgtgtgtgtgtgtgtgtgtgtgtgtgtgtgtgtgtaaatagtgatttctctaagttaataaagaatgtggggtgacctcctacacatgcccgtatgctattgtgtaggaacaaatgcatggtaggaatgggtagactctaatctgaaagcatcaagttgtatgcatcttctgcaattaggaatctgctcaccagcacgagtgctgtggtttctgtagttctgggattcagaggagcattttaaagatgtaggatgttggaggaggaggtgcagggatctccccttgggtaaagagtggga

SEQ ID NO: 1363 - DNA, 601 bp, Human
ccttgattgggctacccaaggatgcgcccgccctgctgaggtctgacagctctgggaggccagtgaggcctgtcctaatccctgttctggccggtgattcagctccaggtggaggctgtgcagaaacagccccggtcatctttgtgtgaaatacatttgtcgtcttcattttcttttttcttctgctggtatcttcatggttttcagcaaaactgtgtacattacatttttttctttaccatttctccgtagttatttctagcatttttttttcagctgatgaaagcaaatgaagaatttktatgctccatagtcagtcaaacattgatttctctgacttttaacttagaaagtcattttgcagtggcttgcgtgtgtgtatttagactgtgcttctacaaaaaagcacacgtaggcttatggctcagtttacttgttccagctcactttcctgttcatttaccttcttgtaaaatggaaagacaaacataccttaaacttaactcagatcgtgattgccaactttgttctctgtgtgtaagtagttatattattcctaggttatggcatcttgatttatctttgaaagaagaaaaccctc

SEQ ID NO: 1364 - DNA, 601 bp, Human
ttagcaaatagcaagaagtctcccctttagaaaaggaaaacaagtacttaaaaaaaatcttgtgttgtcaataaacaagtccattttaaaagcatctttgaaggtgtgtaatgaaaatggaggccttaggttgtatcagggtttatgaggagccagcttatctgtaatcagatgttcctgttactgttatcactgtagtatagggcttagttctgccctttaagtcacagactcaagttactcctgattttaccagcagtcagaatacatttttctttaaaaggaaaagagacgatatccyagtgcttctctatactaaaacaggaagagaagcttccttgttgaagtgacagtttagatgttgttattttgacagaaatattagtaaatatgtcacattatcccttgctaaatatttatagcatagaacgtatactctgatgcataatattttatgaaagaaatatcttttgcctcaaatccctttcactgttttgacatgaatctataatttatacccagaggtctgcaggaaaaagactttattaagacccttttatttcagccaagataaaactccatcctaagagggaacaccctg

SEQ ID NO: 1365 - DNA, 601 bp, Human
gcgggcattgtctctggcataaatgaacctctatcaaaacaaacacccagagagaggggcagcctggttacagctgcctgtgtgagcctcgacagtgggcctcattcctcacaaagggagctttgaggcccggaagaggcctttccttgatgatcgagctgtgcacagggagcaaaccccaagccgactgcttgtctgtgccaccctcaaacaatgatttccccaaattggacagcctgggtttgtatccttgagcacggttttgggaagagcattctgcatgaggcattgtagctatgtrtatggagtataattctgttttcaggttgctctgccacagaggttaagaactccctcttccaaggtagacattgagaacagagacgaccacactgggttttcactgcagcttttaaacaggatgactcccagcccccatccccgtggctagcagcaagcagggactctgaaacactgcaagccaatggactgagcatcttacttttgctgtccgtgttttggtgttttgtaaacccatctggtaatgaccctgatgccccatgtcccagcaagggcataggtacctgccattgtgcaccaa

SEQ ID NO: 1366 - DNA, 601 bp, Human
cacttgaacccaggagttggaggttgcggtgagccatggctcatgcatgtaatccttgcactttgggaggctgagacgggcggatcacaaggtcaggagatcgagaccatcctggctaacacggtgaaaccccgtctccactaaaaatacaaaaaaaaaaaaaaaattagccaggcgtggttgcgggcgcctgtagtcccagctgctcgggaggctgaggcaggagaatggcttgaacccaggaggcagagcttgcagtgagccgagatcacgccactgcactccagcctgggtgacagascgaaactccatctcaaaaaaaaaaaaaaagttatttctctatgtaaacaaagaaaactctccttccttataacttgtatgtgttgggtctatttgtattctgtgaaccataagaaataagtcaactatcagctgggcgtggtggctgacgcctgtaatcccagcactttgggaggccgaggcgggcggatcacgaggtcaggagatccagaccatcctggctaacacggtgaaaccccgtgtccactaaaaatacagaaaattctctgggcgtgttggcgggcgcctgtagtcccagcta

SEQ ID NO: 1367 - DNA, 601 bp, Human
gttggaggttgcggtgagccatggctcatgcatgtaatccttgcactttgggaggctgagacgggcggatcacaaggtcaggagatcgagaccatcctggctaacacggtgaaaccccgtctccactaaaaatacaaaaaaaaaaaaaaaattagccaggcgtggttgcgggcgcctgtagtcccagctgctcgggaggctgaggcaggagaatggcttgaacccaggaggcagagcttgcagtgagccgagatcacgccactgcactccagcctgggtgacagagcgaaactccatctcaaaaaaaaaaaaaaagttatttctctatgtaaacaaagaaaactctccttccttataacttgtatgtgttgggtctatttgtattctgtgaaccataagaaataagtcaactatcagctgggcgtggtggctgacgcctgtaatcccagcactttgggaggccgaggcgggcggatcacgaggtcaggagatccagaccatcctggctaacacggtgaaaccccgtgtccactaaaaatacagaaaattctctgggcgtgttggcgggcgcctgtagtcccagctactccggaggctgagg

SEQ ID NO: 1368 - DNA, 601 bp, Human
taacacggtgaaaccccgtgtccactaaaaatacagaaaattctctgggcgtgttggcgggcgcctgtagtcccagctactccggaggctgaggcaggagaatggcatgagcccgggaggcggagcttgcagtgagagatcgcgccactgcagtccagcctgggtgacagagccagactctgtctcaaaaaaaataagtcaactatctcaaggtaattacccttttgaatacttgaggacatcttttctgtgccctctgaatatttccttccccagataaaatatttctagttcttttacytgttctttgtttcagagttttaagtctccatttgataaagtatagtttaatagccttcgaaaccacatcgttgagatttaaaaagccctccttgagagacatgaccagtagaaatcataccaggaccgtttagcaccctaactctgggagccatggctcttgggatgcggctgaagattgtgttatcgtcctgaagctctcttggacagctgagtcaatgactggaggtaggaaagttccttgaactctttcttgtgcccttccagctgtgagctgtgtcaccattgtattatttttaca

SEQ ID NO: 1369 - DNA, 601 bp, Human
cgtgtccactaaaaatacagaaaattctctgggcgtgttggcgggcgcctgtagtcccagctactccggaggctgaggcaggagaatggcatgagcccgggaggcggagcttgcagtgagagatcgcgccactgcagtccagcctgggtgacagagccagactctgtctcaaaaaaaataagtcaactatctcaaggtaattacccttttgaatacttgaggacatcttttctgtgccctctgaatatttccttccccagataaaatatttctagttcttttacttgttctttgtttcagrgttttaagtctccatttgataaagtatagtttaatagccttcgaaaccacatcgttgagatttaaaaagccctccttgagagacatgaccagtagaaatcataccaggaccgtttagcaccctaactctgggagccatggctcttgggatgcggctgaagattgtgttatcgtcctgaagctctcttggacagctgagtcaatgactggaggtaggaaagttccttgaactctttcttgtgcccttccagctgtgagctgtgtcaccattgtattatttttacattgttgttgttcttga

SEQ ID NO: 1370 - DNA, 601 bp, Human
agtctccatttgataaagtatagtttaatagccttcgaaaccacatcgttgagatttaaaaagccctccttgagagacatgaccagtagaaatcataccaggaccgtttagcaccctaactctgggagccatggctcttgggatgcggctgaagattgtgttatcgtcctgaagctctcttggacagctgagtcaatgactggaggtaggaaagttccttgaactctttcttgtgcccttccagctgtgagctgtgtcaccattgtattatttttacattgttgttgttcttgaaaaagcttttttttttttttcaaggcagagtcttactctgtcgcccaggctagagtacaatggtgcgatctcagttcactgcaatctccgcctcctggtttcaagcatttgtcctgtctcagcctccccagtagctgggattacagacgcctgccaccatgcccggctaatttttttaatttttagtagagatggggttttgccatattggccaggctggtctcaaactgctgacctcaggtgatcctcccacctcagcctcccaaagtgctgggattacaggcgtgaaccaccgtgcccggccaaa

SEQ ID NO: 1371 - DNA, 601 bp, Human
cttgaaaaagcttttttttttttttcaaggcagagtcttactctgtcgcccaggctagagtacaatggtgcgatctcagttcactgcaatctccgcctcctggtttcaagcatttgtcctgtctcagcctccccagtagctgggattacagacgcctgccaccatgcccggctaatttttttaatttttagtagagatggggttttgccatattggccaggctggtctcaaactgctgacctcaggtgatcctcccacctcagcctcccaaagtgctgggattacaggcgtgaaccaccgkgcccggccaaaaaagcttttgaaaacttcgtcgtataatattatggccatccttccaaacgtgacctttttatgttgtattttatctaactaatttgcccttgcccccaacttttatcttggaatttcttacgtattaatatactgtcagggtccctgcttggggcattgtccttgggcttgtcattagataactccaagttggcttgactccagaggagctgccttcacacgtgctgtgaaatgtactgttgttgaccagagaccatcgttatcattaagtccacaaacctgcttcctg

SEQ ID NO: 1372 - DNA, 601 bp, Human
tgctggtgaattggaagcttctcgtcatcccccttggctggggcgaggcttacttcctggggccttggcagttttgatctaactgacttatgttacctttctgtattaatcaagcctttttattttccatacttctgatgctttgacatcttggggccttgctgaccctgaagagaccagcccccctagggttagccagttcctaggtagtgaatgagtacaatgctcatatgcaaaataaccaatccaaaggccacgcccctcactcatatgcaaaataaccaatccaaaggccaggccycttaccacctttattgggatttcatactccaggccaatattgccctaccttaatcaccctagggccagataccaggcaagagacagcccctacaccccagagcctgtcagaattactccagccagctagtcctaaacctgcttaccttgtgtgatttattccttcccaaggaaaccacaataaaggctctcctccatgttttcctaccattccctctgcctcaggaccaaccttggttcttctccgtgtggccccttggcatggtgcactacctcttcttggggactgtgagtaacagac

SEQ ID NO: 1373 - DNA, 601 bp, Human
cactatgcccagctaatttttaaattttttgtagagatgggggtctcaccgtgttgccggggttagtctcagacttctggcctcaagtgatcctcccaccttggccttccaaagtgctgggattacacgtgtgagccactgtgcccagcctgtttatatggttttaaaaacaaaaatgtatatgctctcaagatggctttcagagagcttattagtgtcttggccatttggaattccatttcacttaaattagaagagtgaaagagaaatgaatggaagaccaaaaatggggagaagaaactgtatctgatataagcgtggctctacctgggagaatggccattccgaattactggaaacaggaagaagacttgctatgatgcttccttatatctgtgggggaaaatcaaacttacattctgaaaggaaacttaatacttcatgtttttaaacacaaaaggatattttttcagagtagcagttataaagttgttagtttaatcttttagttcagctttttttcttaccagaaaaataattagtagtacaaaaatttatgcgtttgttttagctctattctgatactgttaagaagatacat

SEQ ID NO: 1374 - DNA, 601 bp, Human
ctgttaagaagatacatgacataaaaacaggaatattttcagtcagtgattacaatttaaaatcatattcgaaatttaataaaaagtttaaaagaaatcaccagcataagatgttgtcatttggctcttggggcaaaccagctctcttctggtgaaagaactttctggatgaggtcgaaaggcaacagaaaacctggggaacaatggctgtctttttaatgggagttgctcctattcctggtggtaacaacctcttcctgttgctcctttccgaatggaattgcctcagtgaagttgttgaagaagtgaggagggcgaaatatgcccatccttctacagtggggagaggcctggcgcatgaaagcaggcctttgtgtatgccgggctgggcccatgcaaacagggcacaatcaggctattgtttgtttgggaaaagctatggcatcctattgcaattatttatggaagaaaatatttgatgtttttggaagaggttaggtgtggggggtgatgagggagggaggaaagagactgggcttacctcttgtcccattcactccaaatctctcagtgcgtaggatagggtccatctggtccaaag

SEQ ID NO: 1375 - DNA, 601 bp, Human
tggttctggatgctgaaagtccaaggtcaggtgtcaacaaggtctggttctagtgagggctctcttcctggtttgcaaacagctaccttctcactgtatcctcatatagtggtgggagagagcaagctgtggtgtctcttcactgattaaggacattaatccaattgtatcagggtctcacccttatgacctcatttgatcttaattgtctccttaacagccctaccttcaacagagtcacatgaggggttagggttcctacatatgaattggcagggtggaggtgggaggtggccggggrtgagacacaattgatttcatagcgtcgagttataagatgggtcacagtattagatgggaccagagcagagagggtctgtaggccatggcaagagtgagaatttactcaatacacagtggaagttggggatgagtgagaagcacaagagtggcacactgatttctacaacagtcagtctagctgctgggtggagaaggggagaaggaggaatagtggaaaaagcagggagaccgcttaggaagctgctgggaccgtgcatatgagagatgttggtggcttgaaccagtgctgggtttctca

SEQ ID NO: 1376 - DNA, 601 bp, Human
gttataagatgggtcacagtattagatgggaccagagcagagagggtctgtaggccatggcaagagtgagaatttactcaatacacagtggaagttggggatgagtgagaagcacaagagtggcacactgatttctacaacagtcagtctagctgctgggtggagaaggggagaaggaggaatagtggaaaaagcagggagaccgcttaggaagctgctgggaccgtgcatatgagagatgttggtggcttgaaccagtgctgggtttctcagcattggcagtattgacgttttgggtgarataattagttggggagtggcagggcggggggtaggggtgcagtcctgaaccagtgccaggtttctcagcattggcactgttggcattttgggtgagataattagttgtggggggctgtcctgtgtattgcaaaatgttcagcagcttcactagtctctacctgctagatgccagaagcccacccaccccgccccctagtcatgacaatcaaaaatgtatctagacattgacagatgttaacctgggattagggggtggggagaccaaaattgtaccctgttgagaaccactggaccagag

SEQ ID NO: 1377 - DNA, 601 bp, Human
ggatgagtgagaagcacaagagtggcacactgatttctacaacagtcagtctagctgctgggtggagaaggggagaaggaggaatagtggaaaaagcagggagaccgcttaggaagctgctgggaccgtgcatatgagagatgttggtggcttgaaccagtgctgggtttctcagcattggcagtattgacgttttgggtgaaataattagttggggagtggcagggcggggggtaggggtgcagtcctgaaccagtgccaggtttctcagcattggcactgttggcattttgggtgagawaattagttgtggggggctgtcctgtgtattgcaaaatgttcagcagcttcactagtctctacctgctagatgccagaagcccacccaccccgccccctagtcatgacaatcaaaaatgtatctagacattgacagatgttaacctgggattagggggtggggagaccaaaattgtaccctgttgagaaccactggaccagagtcatagcaatttgcagtggatagatttaggaatatttgaagacttgtaaaatatagcctgaagggaatggagactgggagagtgaaagatacctctga

SEQ ID NO: 1378 - DNA, 601 bp, Human
aaaagagccaggactagatttcattctaatgcttataaggagagttctaggaaaccctcagacttggtaaaccaaggcatttggagatactatgaattggtttaaaaggccatttaccacttcttttgtaattggccttttaaaccaactctcacttagctgattaaatgtggtcatttaaactgctagttaacaatcggaagtgcagtggcgcaatctcagctcactgcaacctctgccttccgggttcaagcgattctcctgcctcagcctcctgagtagctgggattacatgcgcacrccaccacacccggctaatttttgtatttttagtagagatggggtttcaccatgttggttaggctggtctcaaactcctgacgtcatgatccacctgcctcggcctcccaaagtgctgggattacaggcatgagccaccgcgcccggcctaagatttcttattgtggtattctgcagtggagaatgggagttggaaagaaatgttttctcccacacctgtcccgctcctgtctactgaaagctgattaatcagtcagatagtgagttcctattggtagtacgcctccaaaatttggaagag

SEQ ID NO: 1379 - DNA, 601 bp, Human
aagtccttccaaatagaaaaactttattaatttaaaaataaccgccaattcagacttcgattcaaacaaggcattttaccaagtccggctgaaagagcttcttaccacatctggcatgtagaatggcagaagactatttttgctagattccttgttgctgcagccgtttctgatgtccttttccccttcacacctttcgtgttacacatgtctgagatgacatgatgctaagtaaccaaagtactgctgcgatggaattgctctgatgtttttttccagagtgaaagctgctattactttaaaaaaaaaaaaacttgaggtttggtttctttccccctctatccgggtgttatacaaatatgtaattaagatgtttgggggttcagatgacaaacaaggagtctacttctaagaatgcatttgcaagccaaaagagtggtgaaccacttcagagtgcgggtctgtgggggatgatgtctgctttgcttcgttttgtggaataatttttaacatttctatttagcattcatgatactctaaatagaagcaggagaacactgtggctctcggatccaggagaggcaggccacgagggctcctg

SEQ ID NO: 1380 - DNA, 601 bp, Human
tttcgtgttacacatgtctgagatgacatgatgctaagtaaccaaagtactgctgcgatggaattgctctgatgtttttttccagagtgaaagctgctattactttaaaaaaaaaaaaacttgaggtttggtttctttccccctctatccgggtgttatacaaatatgtaattaagatgtttgggggttcagatgacaaacaaggagtctacttctaagaatgcatttgcaagccaaaagagtggtgaaccacttcagagtgcgggtctgtgggggatgatgtctgctttgcttcgttttktggaataatttttaacatttctatttagcattcatgatactctaaatagaagcaggagaacactgtggctctcggatccaggagaggcaggccacgagggctcctgctgtttggggacagtctgtaactctaaatctttttatatgcagcaattatgaccttaaaaatgggtgactctaatactggcattcattgcctaaaaataattttaatgtgcaaatgccagagaccaggtcatctcagaaatggactagaattgaccactgctatgttttggtgaaacctgataaccttgctttt

SEQ ID NO: 1381 - DNA, 601 bp, Human
ctcctttgccatgtgttttcatttctgccagacactggcactggggaagcctcccatcgtctcagactcagggtgtgtgaaaaacaaacctgctttctggactctacagtttgtgcactagcctaagccgaaaatcttgaaatctgtcatcagtgactattgtagtccataggaatacccaagactgggtaatttataaagaaaagagggttagcttttttttttccggctcatggttcttcaggctgttcaagcatggttccaacatctgatcatcatctttttttttttttttttagayggagtctcattctgtcacccaggctggagtacagtggcgccatcttggctcactgcaacctcccacttctgggttcaagcaattctcctgcgtcagcctcccaagtagctaggattacaggtgtgcgccaccacacccagctaatttttgtatttttagtaaagatggggttttgccatgttggccaggctgatcttgaactcctgacctcaggtgatccccccaccctggcttcccaaagtgctgggattacaggtgtgaaccaccacgcccggccaggatctgatcattttctaggag

SEQ ID NO: 1382 - DNA, 601 bp, Human
tggagacagattaagaccctgtctctttaaaaaaaaaaaaaaaaaaagtttgtaaaatatcacccagttttccctaacgttagcattttacataatctatacaccaattctcacagccaagaaattaacaatgacacaatactgttaaccatggactatttgaatttcaccagttttcccactaatatcctttttcagtcccaacatccttcattgtgtttacttactatatctagtcttctccagtctgtaaaaatgtgtctatctttgcttgtttttcatgaccttgatatttttgaakagtatggacaggttgttgcatagaatgctccaaattggttctaatgtttctcatcattaaactcatttttatacattttggggaagactactacaagattgacattgcatctcagtgcgtcacatctgtgtgatgtcagcatcttaccactgatgatctcttagccttgaacacttgattgaggtggtgcctgccaggtttctccagtgtaaattttctgcttttcgcattgttactgatatcttagggctgatactcacagtatgcagatgtctcgtttctcttttttcatatttcttt

SEQ ID NO: 1383 - DNA, 601 bp, Human
cctgccccagggaggagtttgagttggtacatcctgactgggtactctgcctgtggttagcaaatactctgcatgttgagtgctttcaaaatacagaaacaaacaacttgtggaggcattggaaaagtgtgtttgagaaacaagcagcctcaccatgaatgggagtttgtttccctttctcgtctttctggtcatctgctgcacgggcaggaggagctgtgggttgcttttcttccttggaacatggagcaccactctcccctgtgctgatacacttacaaagaagttcacctactccttggaaagttctggaaaaggggcttctacactgttggcctctcgaggagaacggtttttgtttctgtcttcctggaaaagaggtgactgctggcatcatctttctagataaactccttgctatgatgccattagaagcagtgttcttttgtgttttgcttttgtttttccctgtagacaggaataacattttgactagaaacttccctgatgtaataacgaagatggcctccttagaaagttccagaacagaccccttcacctctgtccccagaagcagaagtaggtgatgcactttcttggc

SEQ ID NO: 1384 - DNA, 601 bp, Human
tatttcaagttggaacctctaggtttgaaaaatacatgttttgggtgagagtttgattattcttaaagggacatatctttcaaacatatggctgtggaagaggaaacttgtttttgacttgtaaaataccagcagagccttgcagtgatcacaacttatgtgaaatacagaccatcacccacagtttacgtgttcacactaaagtgccagtctctctatgggttttagagctgatttagatacatgcattgctaatacagtcagcccagccaagatagtgccatcctccgcaagcatccamtaaggcatggagtcagcttccgtcattgttagatcagtacttgtttctttcccttgcttatttttcctaacctctctgaacctgctgtgttggaagcttaaggaacatcatcctctgttgggcagaattcttccatggccaccccagcattatgccccacaccatttgacttactcatttgtgaatgccaactcagaatgtattgctttgattcttgattaggatctcaacctctatttattgttaagactatcaccctttgattcccccccatcccattgtgtccttctaaaggcacag

SEQ ID NO: 1385 - DNA, 601 bp, Human
ctgttttcccttctctctcaccgtggccattacgggctgctgtttacaaaaatcctgcaggcctttgacaccccgtcctcccttcccccggcatccctgcccttattctggctttcttctcttccatctcctggtgagcacagcatactgttctcaggcttgttttccttttattgctctccatgtgggacaggtcatgctttatcaacatgtaccattttctacaaatgccgcccttcctctttaaattgcttggatgggcagatcgattttgattagcaacactgcagcagaaacaagktgcatctctggaaggactgggtggttttctcgttattgttgctggtttgggtcacatcggatgctattttaaattctgtgttttattccacgatgggtcttgaatcctttccctattcctaggtttgaaatatgtttcctccctttaaaaaaaagaaggggggcagtattgtgttgaaccaaatgtttttctaccttctcctgtgatctgaatcaggtttcccatttccagcagtacaatgtggttgtattcagtgtgataggggcgtagtggacatgaattatttgcgacagggctgcc

SEQ ID NO: 1386 - DNA, 601 bp, Human
cgagtaccctggcctggctttgggttctacacggtctgactttagcctgccttggtctttgttcccctctcactccctccacccctgccccccccaacacatgtggagtaccttaccctgccttcctagttctggaatggctgcccctgtgccaggccaccccattttctagaaccaccttcatacagcccctgcgcatcccactgtactatttccttgtttgtttttcctgtcaatcttgccttccgcgctaatgggacactgatgctgtatggtgatgtgttctcccacagtcatcttytcctcctgtggttggggtggggagctttctctgtgtccccccatgagagtgaggacagtctcatttaatggcaccatggtctgtggagccaggcaggcctgtgtgtctgactccacttcagcgctctcagccagcgtgggcacctcggacccagacagacgccccgagcctgtctttctggagaaggaagtagtaataccttttccttgagggagttatgaggattaactgtgcctggccctgaattcgtgccttgcaggtacttaggaagtgagttattacaagcagtgctttttatca

SEQ ID NO: 1387 - DNA, 601 bp, Human
gctttctctgtgtccccccatgagagtgaggacagtctcatttaatggcaccatggtctgtggagccaggcaggcctgtgtgtctgactccacttcagcgctctcagccagcgtgggcacctcggacccagacagacgccccgagcctgtctttctggagaaggaagtagtaataccttttccttgagggagttatgaggattaactgtgcctggccctgaattcgtgccttgcaggtacttaggaagtgagttattacaagcagtgctttttatcatccatagatggagatgttatctaygctataggactgcagaaagaattacagagaattatgtagaatcactagggacttgattaatatttgtttacctttcccccacatggattgatgtcctttattatacttttgtacccccgcttggcaagcccttgacaaatattgatccaacaaaaaattagctctttaatgtatacgtttagaacctgttgctttgtcagtagtggtttttatgaaaatgaatgcttataggtcagacttctggaaaccctaatctgagggaattgggccaaataggaaagtgagccccttaaaggcagt

SEQ ID NO: 1388 - DNA, 601 bp, Human
cagttactagagcagagtggccgtagaggctgcaacacggtggccaaagcatgaagctgctgtatagtggcaaggtcacagtgatttccccgcagcctcggtttagagggagacggggtgtgctgagctgtgcctgcttctgtagaaggggccttctccaagtctgagtagccttaagccattaggactgctgagtctttctccacaaaaatatgtgggaggcctgcagggcaggtgctcaactaagctctggggctgcaaagatccagagccatgcccctccttggaggcaggtccttgyagacgaggacaatcgtagccttcctgattaaagcaggaattgtccaatcaggctatatgacgggcatcgtccatagtcttcaccaggggagcttttctgactatacatctctagccctgtggcttgagccagtcacttaatttcccctgagctttggtttcctcctcctggtagcagagagactatcagagtgaggggcagatgcaatagcatatgtaaaacacttagcgttgggcctggtgtttaactgcaataaatgttagctcatattttactgtgacatagatgctgtatgccttt

SEQ ID NO: 1389 - DNA, 601 bp, Human
ttttagtagagacggggtttcgccatgttggccaggctggagtttcttgaagtattgactgatccttgactctgaactgtatgatcaaagacttttgaaatggcacaccgtttcttaacatttaggccaatttcagttgctcatatccaaaaataagtcatgattttcggagtcagtgcgcagcacttagtacaacaatccaaacccttgtacagaccatcctagtagaaatgtggatcttgagtatctcagcttcttagtagattttgaactccgtgaaagcaggagccaggcctctcamagcaagtctctccaatatgctcagtaaatatttgtcagatcgagcaatgaccagatgatgaaatacattaaagccttagggagaactgagactactgcaccagtttttgtgcactatcatgctggaaatctttccaacatgtattctgtacttctttgcttcttactccagtgaatataatttagtcatttctggccaacttgaggacatcagcgagcataaattgttgtattatgcataatacagtgataccctcaaggctgagtgggaggcagtttgccctctgctgaaggtttcttg

SEQ ID NO: 1390 - DNA, 601 bp, Human
ttggtacaaggcacggaccaaatccatggtacgctcactcctttcctttcagtaatactgcctaaatagggcacatgtacctaaaaggattttgtacattccttgacagcagaattctcatcttctgttgcatatcccataatgctgggaacacaaaataaaaatggtagcttttcacattcacttttggcctcaattttttgttattccccaatgaggatcatttcatttggggctggtctccggaaaaaagtagatcaagcttttcagatgagatttgggtgaaaccctgacaaactcttttttattgccttccctaccacatagtggtggatcaggaaactgtagggcttatgatgctgggaaatttctgctaatgcaataaagatttttgctgttgaaagaatttgatctgttttatgtataacatgcagagagcagaagcatatattatctgtagcagatgatagagcagggtatatgggcaagttagaaaaacacagttctcactacatttgaagaaaaaggacaaggagttgtcacaaggatccaggagagtcgcacataattttctgtcgtgcattttgttgactgttcctct

SEQ ID NO: 1391 - DNA, 601 bp, Human
acagatgttaacatcttacataaccgtaatacggttatcaaaacagtgttcactccatactccagtgctgttaatctccagactgaattcggatttcactattttcccactgatgtccctttttttggttccagatccaagagacgatcctacctggcatttattgtgttcagtttttctaattctgggacgttttcctgggttttctttagtcattcacgaagttcgcacttttggagaacatggggccagttattttgtagaatatctttctgttagagtttgtggatgtttcctcctkattaaatttggggggtacatttttaacttggagatcacagaggtgctgctgtttgtgtctttgcgcatcctgtcaggagatgcgtgatgtttcctttcctggtgctgttagctttgatcccttagttaaggtggtctctgtggcttcctccattatcattactatttttctctttgtaattaggaagaatcttttggaggtagatacttgagactatctaaacaagcattctgttcctcattattctttcacccactaattttaacatccattactgtgatgtttgccaaatggtgattt

SEQ ID NO: 1392 - DNA, 601 bp, Human
tactatttttctctttgtaattaggaagaatcttttggaggtagatacttgagactatctaaacaagcattctgttcctcattattctttcacccactaattttaacatccattactgtgatgtttgccaaatggtgattttctatttctgttttctacacttagtaattggattctactctcaggattttatgtattttttaacagtgagggacataaactttttaactagcagtggcaagtccacttttatttgggaggacaattactagtcacatgaagaagaaaaaatatgcagaascttaagaaatcccacatatgaatgttatttgaaatgttcttgccctttctccctacaaaggaggtgaagaagatgacaggagatgttaattgccaaaatagtctcatagttttggtcctggctgcaaatctctcgtttttgatactcaagagaatgctattggggaactgactctgaagcacagcccagatgcttgagatgggttgggaaggtttacatcaacaccatgaatttaatttatcatgtgacattttatttctgagtttttaaagctgtaattaaaagaagtgttcaaagtgt

SEQ ID NO: 1393 - DNA, 601 bp, Human
cggcgtgcatagcggccacgtgactgcgccccggccacgcccaccgtccctcacgtggtcccaggccacgctgggcttcggcatgtgctaaagtggatagaaaagggagtggggcccgggcgtggctttgtggtttgggaagatatgaactccttggggtttttttctcttttaattctttaattttgatatttggaaatgcgtaaaaggtttttcatttgtccttgaccacgtggtccaaacctcaatttccctagcagaacgcggtttcgatcactggtggatccgtctcacagcaccrgtcatgctgcctcgctgggaagtggagggctcaggattcccgtggttcacgatccattttatgttggaaggaaatcattttgaactatctcagtacacaccctagtgtatctttaaacctaattgagtgttgatggaaaatctgcggtccgagaaccgtaagaaaagggggctcccacctcccgctctggggtcgccacttgcctcgcaggcaggaggaggctcccagagtagatacaacttgcccgtcacccggatgggttggtagtgcacatatgcacggggcgcagtttaaaatgaa

SEQ ID NO: 1394 - DNA, 601 bp, Human
ctagcagaacgcggtttcgatcactggtggatccgtctcacagcaccagtcatgctgcctcgctgggaagtggagggctcaggattcccgtggttcacgatccattttatgttggaaggaaatcattttgaactatctcagtacacaccctagtgtatctttaaacctaattgagtgttgatggaaaatctgcggtccgagaaccgtaagaaaagggggctcccacctcccgctctggggtcgccacttgcctcgcaggcaggaggaggctcccagagtagatacaacttgcccgtcaccyggatgggttggtagtgcacatatgcacggggcgcagtttaaaatgaaagtaaaagatgcaaatgtgtttgcaaaagaaaaattaacataggatacgtgcgggcgttctcagttgaactcggtcttactgttccacgcgagcaccccatgactcagagcccaaatctcagcggaacagcccaggacgctcctgccgtccacaggaagacgcctctgtctctgtcccccgccgccaccacacagatgcacgtactctcttcacttccgtgtacccagtaaatgcagatcctgatttaaatct

SEQ ID NO: 1395 - DNA, 601 bp, Human
actggcaccaggatgactttttgtgaagcagagcagttggtcttagatagtggaggtgcgggaggcatgagaactgggcagtctgacggctgcaccagccagttggctgtcctttccacctccatgcccaggagctggcccagggcgcgcatgcacaaagccagtgctcttttcaatcagaaaacagcctgcgtatgttcttgcttgcaactcagatatccagcccactgatccaggaagagattcctttgacctgggaagtcataatggcagatatttagacccagctctcaagcaagcmtccaagttgttccggtgaacccgtaactttgagtaacctctgattgaaccagagagtaggaactaggtgcagaaccttgttgaatagaattgtttagcatcgtccatttgttagagcatttcaggatgcctgtcctaaaatttggtatcataatggtatttacctctcactcacctccatctcagcccagtaattaataacaagggacttgcttcttcacctgtttctttattggttgtaggaagtcttttccttaccacagaggaaggagcttctggatccctttgctacgtccagaga

SEQ ID NO: 1396 - DNA, 601 bp, Human
gtgaagcagagcagttggtcttagatagtggaggtgcgggaggcatgagaactgggcagtctgacggctgcaccagccagttggctgtcctttccacctccatgcccaggagctggcccagggcgcgcatgcacaaagccagtgctcttttcaatcagaaaacagcctgcgtatgttcttgcttgcaactcagatatccagcccactgatccaggaagagattcctttgacctgggaagtcataatggcagatatttagacccagctctcaagcaagcctccaagttgttccggtgaaccygtaactttgagtaacctctgattgaaccagagagtaggaactaggtgcagaaccttgttgaatagaattgtttagcatcgtccatttgttagagcatttcaggatgcctgtcctaaaatttggtatcataatggtatttacctctcactcacctccatctcagcccagtaattaataacaagggacttgcttcttcacctgtttctttattggttgtaggaagtcttttccttaccacagaggaaggagcttctggatccctttgctacgtccagagagttttcatctaatctgggtgta

SEQ ID NO: 1397 - DNA, 601 bp, Human
acacatcctcagggatgttgcacaccagtttgcagcctgcagcttctgccctctggcctgcccaggtcctcggctccgggacgaggatgctccgggatttcgggagacagcagttgttttgacatgaatctcaaagttcctacaaagcttatttctttgaagaaggccaaaaaaaaaatgaaacattttcagatctttgttttcagattattcaagtccagaatgttggataagatttttgaagaagagatttatgcttgagattccttttagtttctttctttcttttcttttcttttcctttttttttttttttaggtgacttggccagtttgggtttttacggtgttcagggaaagggttaagaagttaatttgggaagtacagtcatgtgttgtacaagttgctgtctactgatcccttcattgagcaagtaaacttcacacattctcgtgtctgcaaagcatgtggatgcatgggcagttatgtgtatgaactttttttttttttgagaatggctttagtgttcagaccaaggatggaatgaaagatcacgtgtgctttccactgtagagctgccctgcttgttttgattttatag

SEQ ID NO: 1398 - DNA, 601 bp, Human
cacatcctcagggatgttgcacaccagtttgcagcctgcagcttctgccctctggcctgcccaggtcctcggctccgggacgaggatgctccgggatttcgggagacagcagttgttttgacatgaatctcaaagttcctacaaagcttatttctttgaagaaggccaaaaaaaaaatgaaacattttcagatctttgttttcagattattcaagtccagaatgttggataagatttttgaagaagagatttatgcttgagattccttttagtttctttctttcttttcttttcttttctcttttttttttttttaggtgacttggccagtttgggtttttacggtgttcagggaaagggttaagaagttaatttgggaagtacagtcatgtgttgtacaagttgctgtctactgatcccttcattgagcaagtaaacttcacacattctcgtgtctgcaaagcatgtggatgcatgggcagttatgtgtatgaactttttttttttttgagaatggctttagtgttcagaccaaggatggaatgaaagatcacgtgtgctttccactgtagagctgccctgcttgttttgattttatagt

SEQ ID NO: 1399 - DNA, 601 bp, Human
gttgccaatatgattggatttgtactgccaagatggggttttagcacttctaatgcattctggcaaggctggtatacttgtatcaagtgcacagccccactaccaccacctctaccacccacaaaaataaaaactagcaaaataaaatatgagccaacagaattctgtgggaatggcaagtgttttgtttttgtttttagtagtaatctttgcgagaacattccaaagatgatagttttacatttgtatgtttttttccgaggcacttttgaatcatcagatagattaaatataagttccrtgtatttttgaaggtgggagtgttctttggtacagttcccccaaaaaactggttctcatgaggcttatgtggtaattctgttaacgagaatgtatgattatctgggatactctgttctgctctccatcctggataagagtttactttgaaagtctagttgatcttttgtgatttctgcacaatgtaaaaggtactttaacttcaggagatagggccagcaatcagatttgatgatggaaaagagtagtgtagcatttaagcataatgtatactctataataaatgtttacaagtccaaaa

SEQ ID NO: 1400 - DNA, 601 bp, Human
cttacacataaaggcattttatcacaaagccatctaaaacaaaagtgttaaaggcacaatgctgtgtttaaaaagcatgtacttctttaagagctcaaatttaaatatataatacaaacttaagatccaaggaagaaaatggacccaggacacgaagagaagttaacgccacaggtaatgcagatggccaagagatgtgtgaaaaagataatccagcctcaccaacagccacagaattgaaatgagatacctgtttctgcttctggcattgggaaagaaagaaaaatggcactagcagccttttttttttttttttttttttttccccaaaaaatttgctactcttgaggttctgtcaaagaatgtgctgtggcctctagaagcatttttaaaaagagactttcacaagtgattgtgcaaaattgtgaggtcactgaataggtgtgtatcctcctaaggaggtagcgttggaggagctgttcttgttcaatttactcagcacctgtgaagaggcttcactgtgatttgcctgtacaggtgtgcaggtaaaaatctaagttccacaggtagtgcaaaaaaatctacctccctaggtacctcg

SEQ ID NO: 1401 - DNA, 601 bp, Human
gtgtgcccaccaccacacctagctaatttttgtatttttagtagagatcggctttcaccatgttgaccaggctggtcttgaactcttgacctcaggtgatccacccgtctcggccttccaaagtgctgggattacaggcgtgagccactgtgcctggccggcccttccttttagacaatagaaacatgctgcaaccacataccaccataaacacggtgggggaagaggctgcaatcaacagtcaggaggatctgggttccaagcccaggtttgcagtgtaacagctgtgtgctcttggtgygaacatttggtcatgtacaaatgaggataatgatactgcccccttgtgatcattagggggattaaattaaatgcagaaatatatgtgagatgcttaatgtgttgtaaggcgcatggaatatatttagtgaatattaactgtatattaatacaaagtcctgtattcagaatctccagtataaattacatttatatagtagagatatgaatagtttttgtgaacaagaagacctggaacttcaggtgactagaagctcagagtgagccagctatgtttgatgatagttattcttaagatcac

SEQ ID NO: 1402 - DNA, 601 bp, Human
cactttcgtgaagttaggagcggttaatcctcctgcacgaggatgcatgcctgctagggaaagcctccctgcgtttatatggaacagtggtgtgtaccttagggcaacccagaaacagctgagatggccctaaactcttccgtattttgattcagaagctttaccttatttgaacatctgcagaataagttctttcctttagaaatgattggggataaaattgtttgcattatgaaatattgtatggccaggtggcccctctttcatgttttgttccttgtgaagaggttgagtctcctattttttttttttttttggagatagagttttgttcttgtccctcaggctggagtaaaatggtgcaatcttggctcactgcaacctccgcctcctgggttcaaacgattctcctgcctcagcctcccaagtagctgggatcacaggcacgtgccaccacacctggctaatttttgtatttttagtaagagatggggtttcgccatgttgggcaggctggtcttgaactcctgacctcagttgatctgcccgcctcggcctcccaaagtgctgggatcacaggcgtgagccaccacgcccagcc

SEQ ID NO: 1403 - DNA, 601 bp, Human
taaaagctgaaatgcctttaatcgcactcagtgtgtttattcatggaagccagagaagagggtcccttcctttcccccatagcgccgtaattggaaatttggtagtactaggtgaaattctcagttttggcgctcgcatggaacagccatccatctgctggcgagacacactgcccggggcttttcaagaaatcccttaatggtcctgaacactaataatatttatatacattgagatgagacaaaatttacagcgggctctggggctggctccaggactctctaatcccacacttgctcrcgttctcttgcttgcctcctagaatcctttcaggttgtgcttcagtgaggggagcatggtgtccgtctctgcagcaatgcttatttatgcagttcgtcctctaacaaacagagcaactttccttttgaccttcccctcttctccccatcacattccattgctgcccccgcatagagcatgtgcttatgcatagtttgcatcatttaacacgaaggaaccccttgatttgtgatccctttaagaagttgctctgtatataaagaaaatgatttttcctggttggttttactgaagttcctt

SEQ ID NO: 1404 - DNA, 601 bp, Human
ttcaacgttcttattactactgcattaatagctacttgatcttaatgtctattacacatcattttatataatgttttctttaaattgtcagggaaagggattctgcaagtagatgttggtccccccagttagtgtctgatgatgatggtaagattctcagagtttccttcctctaatgacaaagcatggtgatggtgatgtctgaagagcagcctcggtgctccaagatgggtgtatgcttaatactgctggcacacgcctgacgagcgggaatgtgagcgttgtttctgtaaccagtttyactgaacctcacagatccattatacgacgtgaattttgtgggaataacataggctgggagtctgctctcttccagcctggtccctctcttctttcagccctaccctctctgatcatcatgtcccttgcactgcggccaggtaacctttctgatacgaaggtctgggcatgttgttcccttgcctaaaactttccatggtttcgtattatccacagttgggctaaaccctctgggacaggccttcagtgcctccccgggcagtggtccctggccttcttcagtaacacccaagcccttgca

SEQ ID NO: 1405 - DNA, 601 bp, Human
aagcccaggaaacaccaggcagctccactcactcccgtacttgctgtgtcgtccgttccctggggacaggattgtcgctgatcctgcgtgcatctgtctggcacacaggtgcagcacacattaaatagctgctaaatgaataaatgaagaatagatggaattatattctgttgtgaccagtttaaaaacatgaaattggaatacccaattgcagtgtttctttagatcttggaccttgaggtgacctctgtaatggatatatttgaaattattaactgtcttcaagtgggggtttgatgaaagagagagagagagtgtgtgtgtgtgtgtgtgtgtgtgtgtgtgtttacagaaaatatgctaggtttgtacattcaaatttgtgttatcctcttcaagaaagtcaccttggtagacagcatatatatcccaacattttaggaactcataaaatgcatacttttttggtgtgatcagagatgggtaactccttattacttgtgggttagattagtttttggaaatagcctggagtcattgagagccaatccttatcaacaaaatggcataaatggacaggaatgggtttcttcttcacttt

SEQ ID NO: 1406 - DNA, 601 bp, Human
cagagtcaaaaagatacacatttaaataattttgtattgttttccaatttgaggataaagtaggaaatgtataatgcaaaccagatttcatattttgttgatttagacttaatttacaagtaaggctgacagcccacagagtgtgatcacgacagcattgttatggaaataaatgccagctcatgcatttgggatgtacaccatggatctgtggttattagatactgatttcactttagcacacgaagaggcttagcggaggtggcttctaatatcctatggttctgtgggctcggagatrctactcacccacttgtcagaggcattgaaaccagagcaactgcatcttgaataggagctaggtaaaatgaggccgaattcccagacagttaagacattctgagtcacaggatgaggttaaaggtcagcacaaaatacaggtcataaagaccttgctgatctagcagatgcagttaaagaagccggcgcaaacccaccaaaaccaagatggtaacgagagtgacctgtgatcgtcctcactgctgcactcccaccagcgccatgagtgtttacatgtcatagcaacatcaggaagttaccc

SEQ ID NO: 1407 - DNA, 601 bp, Human
gcacaaaatacaggtcataaagaccttgctgatctagcagatgcagttaaagaagccggcgcaaacccaccaaaaccaagatggtaacgagagtgacctgtgatcgtcctcactgctgcactcccaccagcgccatgagtgtttacatgtcatagcaacatcaggaagttaccctatatggtctaaaatggagaggtatgaataatccaccccttgtttagcgtgtcataaaaatgggcaaccagcagccttccaggctgctctgtgtatggagtagccattcttctgttcctttactttyctaatcagcttgctttcagtttacagactcaccctgaattattcttgcgtaagatctaagaaccctctcttggggtctggatcaggactcctttcctgtaacacacctatgttcttggacttaagaatgaccctcagacatggtgacttctttgtcatctaacagctttggcttatttgaggtaaaacctttgatatctaaggcagcagaaatttccctgaagtcattttgaatggtatcatctttactatagtgtagtttaatcattttcaaagtaagcatttctgcacactaaggctt

SEQ ID NO: 1408 - DNA, 601 bp, Human; identical to SEQ ID NO: 226

SEQ ID NO: 1409 - DNA, 601 bp, Human; identical to SEQ ID NO: 227

SEQ ID NO: 1410 - DNA, 601 bp, Human; identical to SEQ ID NO: 228

SEQ ID NO: 1411 - DNA, 601 bp, Human; identical to SEQ ID NO: 229

SEQ ID NO: 1412 - DNA, 601 bp, Human; identical to SEQ ID NO: 230

SEQ ID NO: 1413 - DNA, 601 bp, Human; identical to SEQ ID NO: 231

SEQ ID NO: 1414 - DNA, 601 bp, Human; identical to SEQ ID NO: 232

SEQ ID NO: 1415 - DNA, 601 bp, Human; identical to SEQ ID NO: 233

SEQ ID NO: 1416 - DNA, 601 bp, Human; identical to SEQ ID NO: 234

SEQ ID NO: 1417 - DNA, 601 bp, Human; identical to SEQ ID NO: 235

SEQ ID NO: 1418 - DNA, 601 bp, Human; identical to SEQ ID NO: 236

SEQ ID NO: 1419 - DNA, 601 bp, Human; identical to SEQ ID NO: 237

SEQ ID NO: 1420 - DNA, 601 bp, Human; identical to SEQ ID NO: 238

SEQ ID NO: 1421 - DNA, 601 bp, Human; identical to SEQ ID NO: 239

SEQ ID NO: 1422 - DNA, 601 bp, Human; identical to SEQ ID NO: 240

SEQ ID NO: 1423 - DNA, 601 bp, Human; identical to SEQ ID NO: 241

SEQ ID NO: 1424 - DNA, 601 bp, Human; identical to SEQ ID NO: 242

SEQ ID NO: 1425 - DNA, 601 bp, Human; identical to SEQ ID NO: 243

SEQ ID NO: 1426 - DNA, 601 bp, Human; identical to SEQ ID NO: 244

SEQ ID NO: 1427 - DNA, 601 bp, Human; identical to SEQ ID NO: 245

SEQ ID NO: 1428 - DNA, 601 bp, Human; identical to SEQ ID NO: 246

SEQ ID NO: 1429 - DNA, 601 bp, Human; identical to SEQ ID NO: 247

SEQ ID NO: 1430 - DNA, 601 bp, Human; identical to SEQ ID NO: 248

SEQ ID NO: 1431 - DNA, 601 bp, Human; identical to SEQ ID NO: 249

SEQ ID NO: 1432 - DNA, 601 bp, Human; identical to SEQ ID NO: 250

SEQ ID NO: 1433 - DNA, 601 bp, Human; identical to SEQ ID NO: 251

SEQ ID NO: 1434 - DNA, 601 bp, Human; identical to SEQ ID NO: 252

SEQ ID NO: 1435 - DNA, 601 bp, Human; identical to SEQ ID NO: 253

SEQ ID NO: 1436 - DNA, 601 bp, Human; identical to SEQ ID NO: 254

SEQ ID NO: 1437 - DNA, 601 bp, Human; identical to SEQ ID NO: 255

SEQ ID NO: 1438 - DNA, 601 bp, Human; identical to SEQ ID NO: 256

SEQ ID NO: 1439 - DNA, 601 bp, Human; identical to SEQ ID NO: 257

SEQ ID NO: 1440 - DNA, 601 bp, Human; identical to SEQ ID NO: 258

SEQ ID NO: 1441 - DNA, 601 bp, Human; identical to SEQ ID NO: 259

SEQ ID NO: 1442 - DNA, 601 bp, Human; identical to SEQ ID NO: 260

SEQ ID NO: 1443 - DNA, 601 bp, Human; identical to SEQ ID NO: 261

SEQ ID NO: 1444 - DNA, 601 bp, Human; identical to SEQ ID NO: 262

SEQ ID NO: 1445 - DNA, 601 bp, Human; identical to SEQ ID NO: 263

SEQ ID NO: 1446 - DNA, 601 bp, Human; identical to SEQ ID NO: 264

SEQ ID NO: 1447 - DNA, 601 bp, Human; identical to SEQ ID NO: 265

SEQ ID NO: 1448 - DNA, 601 bp, Human; identical to SEQ ID NO: 266

SEQ ID NO: 1449 - DNA, 601 bp, Human; identical to SEQ ID NO: 267

SEQ ID NO: 1450 - DNA, 601 bp, Human; identical to SEQ ID NO: 268

SEQ ID NO: 1451 - DNA, 601 bp, Human; identical to SEQ ID NO: 269

SEQ ID NO: 1452 - DNA, 601 bp, Human; identical to SEQ ID NO: 270

SEQ ID NO: 1453 - DNA, 601 bp, Human; identical to SEQ ID NO: 271

SEQ ID NO: 1454 - DNA, 601 bp, Human; identical to SEQ ID NO: 272

SEQ ID NO: 1455 - DNA, 601 bp, Human; identical to SEQ ID NO: 273

SEQ ID NO: 1456 - DNA, 601 bp, Human; identical to SEQ ID NO: 274

SEQ ID NO: 1457 - DNA, 601 bp, Human; identical to SEQ ID NO: 275

SEQ ID NO: 1458 - DNA, 601 bp, Human; identical to SEQ ID NO: 276

SEQ ID NO: 1459 - DNA, 601 bp, Human; identical to SEQ ID NO: 277

SEQ ID NO: 1460 - DNA, 601 bp, Human; identical to SEQ ID NO: 278

SEQ ID NO: 1461 - DNA, 601 bp, Human; identical to SEQ ID NO: 279

SEQ ID NO: 1462 - DNA, 601 bp, Human; identical to SEQ ID NO: 280

SEQ ID NO: 1463 - DNA, 601 bp, Human; identical to SEQ ID NO: 281

SEQ ID NO: 1464 - DNA, 601 bp, Human; identical to SEQ ID NO: 282

SEQ ID NO: 1465 - DNA, 601 bp, Human; identical to SEQ ID NO: 283

SEQ ID NO: 1466 - DNA, 601 bp, Human; identical to SEQ ID NO: 284

SEQ ID NO: 1467 - DNA, 601 bp, Human; identical to SEQ ID NO: 285

SEQ ID NO: 1468 - DNA, 601 bp, Human; identical to SEQ ID NO: 286

SEQ ID NO: 1469 - DNA, 601 bp, Human; identical to SEQ ID NO: 287

SEQ ID NO: 1470 - DNA, 601 bp, Human; identical to SEQ ID NO: 288

SEQ ID NO: 1471 - DNA, 601 bp, Human; identical to SEQ ID NO: 289

SEQ ID NO: 1472 - DNA, 601 bp, Human; identical to SEQ ID NO: 290

SEQ ID NO: 1473 - DNA, 601 bp, Human; identical to SEQ ID NO: 291

SEQ ID NO: 1474 - DNA, 601 bp, Human; identical to SEQ ID NO: 292

SEQ ID NO: 1475 - DNA, 601 bp, Human; identical to SEQ ID NO: 293

SEQ ID NO: 1476 - DNA, 601 bp, Human; identical to SEQ ID NO: 294

SEQ ID NO: 1477 - DNA, 601 bp, Human; identical to SEQ ID NO: 295

SEQ ID NO: 1478 - DNA, 601 bp, Human; identical to SEQ ID NO: 296

SEQ ID NO: 1479 - DNA, 601 bp, Human; identical to SEQ ID NO: 297

SEQ ID NO: 1480 - DNA, 601 bp, Human; identical to SEQ ID NO: 298

SEQ ID NO: 1481 - DNA, 601 bp, Human; identical to SEQ ID NO: 299

SEQ ID NO: 1482 - DNA, 601 bp, Human; identical to SEQ ID NO: 300

SEQ ID NO: 1483 - DNA, 601 bp, Human; identical to SEQ ID NO: 301

SEQ ID NO: 1484 - DNA, 601 bp, Human; identical to SEQ ID NO: 302

SEQ ID NO: 1485 - DNA, 601 bp, Human; identical to SEQ ID NO: 303

SEQ ID NO: 1486 - DNA, 601 bp, Human; identical to SEQ ID NO: 304

SEQ ID NO: 1487 - DNA, 601 bp, Human; identical to SEQ ID NO: 305

SEQ ID NO: 1488 - DNA, 601 bp, Human; identical to SEQ ID NO: 306

SEQ ID NO: 1489 - DNA, 601 bp, Human; identical to SEQ ID NO: 307

SEQ ID NO: 1490 - DNA, 601 bp, Human; identical to SEQ ID NO: 308

SEQ ID NO: 1491 - DNA, 601 bp, Human; identical to SEQ ID NO: 309

SEQ ID NO: 1492 - DNA, 601 bp, Human; identical to SEQ ID NO: 310

SEQ ID NO: 1493 - DNA, 601 bp, Human; identical to SEQ ID NO: 311

SEQ ID NO: 1494 - DNA, 601 bp, Human; identical to SEQ ID NO: 312

SEQ ID NO: 1495 - DNA, 601 bp, Human; identical to SEQ ID NO: 313

SEQ ID NO: 1496 - DNA, 601 bp, Human
gataatcagtttgtcagagtaaagtgtttccaaatgctggaaacttctgcattgccaactcatcacattatttgcaaactgtactctcttctacccacaattatgaccaccagaaaacaggatcaacagaacgaagggcaggctaatttcctattacaaatgtttttcatttttaatacggcattagccacagaagacctaaagccaactttcagcatttactgtggtgtctacttttgaacttaaaggcacacagcaaataaccctaaaagtggagggtatacagtttagcccttctackcaatgcaaaacaaaacaaattaaggcatgttcctgacttagtatgcattcttctcaacaaataaaagtaattttacagaagatatatagtagcccccaaatgatatctgtaatgtctcagtgcaagaagagataactataaggcagacatcctaggatgaactcccataactcttaataatgggtcccagacacatacagagtttcctgcatatcctgtacaagagaggccaggcccgtgggatggtgggtcggtgtgtgaataatatttcacaaatcctggtacatgaacaaaaggaga

SEQ ID NO: 1497 - DNA, 601 bp, Human
tgtttcctgggttttgttctagaatattcatagtttcagatcttacatttaagtctccaacttttgtatatggtgagagatagggttctagtttcattcttctgcatgtggctgtccagttttcccagcaccgtttattgaatagggtgtcccttcgccagtgttatgtttttgtcaactttgtcaaagatcagttggttttaagtatgtggccctgactctgggttctctattctgttccattgatctgtgtgcctatttttatatcagtaccatgctgtttgattactatagccttcargtataatttgaagtcaggtaacatgatgcctccagctttgttctttttgtttaggattgcttttgctattcaggctttggctactcatatggttccatatgaattttaggattgtttttctaattctgtgaaaaatgacattggtactttgataagaattgcactgaatctgcagattgctttgggcattatggtcatgttaacaatactaattcttctaggccatgatttttgcatctgtgttcattagggatattggcctatagttttccttttttgttgtgtccttgccttgctttg

SEQ ID NO: 1498 - DNA, 601 bp, Human
tgggttctctattctgttccattgatctgtgtgcctatttttatatcagtaccatgctgtttgattactatagccttcaggtataatttgaagtcaggtaacatgatgcctccagctttgttctttttgtttaggattgcttttgctattcaggctttggctactcatatggttccatatgaattttaggattgtttttctaattctgtgaaaaatgacattggtactttgataagaattgcactgaatctgcagattgctttgggcattatggtcatgttaacaatactaattcttctargccatgatttttgcatctgtgttcattagggatattggcctatagttttccttttttgttgtgtccttgccttgctttggtgttagggtgttactggcttcatagaacaagttagggaggattccctccaacttgatttttttttttttttttttttttttcagggagtagtctcagtgggattggtaccagttctttgtacctttggtagaatttggctctcaatctgtctggtcctgtgctttttcttgggagatttttaaagtactgattcaatctcactcctttttactggtcttt

SEQ ID NO: 1499 - DNA, 601 bp, Human
ttcaggagcaggttgtttaatgttcatgtatttgtgtagttttgagagttctcctcttggaattgatttctagttttattccgctgtgatctggaaagatagttgatatgatttcagtttttaaaaatgtactgagactgttctgtggcctaacatatggtctaccctggagactgttccatgtgctaagaggaatgtatgtcctgtggttgttgggtagaatgatctttaaatgtcttttaggtccatttaatcctgagtccaatttaagttcagtgttttattgttgattttctgtgtygatgatctttctagtgcttgtagtgaggtgttgaagtctctcattattattacattgctgtctgtctcctcttaggtctagtggtaatgattttatgaatctgagtgctttggtgtggggtgcatttgtatttaggatggttatatcttgttgaattgatcccgttatcattatttaatggtcttttttttttcttttttaactattattgacttaaaagtctcttttatctaaatgttgcttctcccgctcacttttggtttctatttgcatggaatatcttttcctacctatttacct

SEQ ID NO: 1500 - DNA, 601 bp, Human
gatttctagttttattccgctgtgatctggaaagatagttgatatgatttcagtttttaaaaatgtactgagactgttctgtggcctaacatatggtctaccctggagactgttccatgtgctaagaggaatgtatgtcctgtggttgttgggtagaatgatctttaaatgtcttttaggtccatttaatcctgagtccaatttaagttcagtgttttattgttgattttctgtgtcgatgatctttctagtgcttgtagtgaggtgttgaagtctctcattattattacattgctgtctrtctcctcttaggtctagtggtaatgattttatgaatctgagtgctttggtgtggggtgcatttgtatttaggatggttatatcttgttgaattgatcccgttatcattatttaatggtcttttttttttcttttttaactattattgacttaaaagtctcttttatctaaatgttgcttctcccgctcacttttggtttctatttgcatggaatatcttttcctacctatttaccttgagtctttgtttttaccagttaggtggttttctgtaagcaacatatggttggatcattttttt

SEQ ID NO: 1501 - DNA, 601 bp, Human
tcttttaggtccatttaatcctgagtccaatttaagttcagtgttttattgttgattttctgtgtcgatgatctttctagtgcttgtagtgaggtgttgaagtctctcattattattacattgctgtctgtctcctcttaggtctagtggtaatgattttatgaatctgagtgctttggtgtggggtgcatttgtatttaggatggttatatcttgttgaattgatcccgttatcattatttaatggtcttttttttttcttttttaactattattgacttaaaagtctcttttatctaartgttgcttctcccgctcacttttggtttctatttgcatggaatatcttttcctacctatttaccttgagtctttgtttttaccagttaggtggttttctgtaagcaacatatggttggatcatttttttttttaaatctagttcaccaatctatatcttttatgtaaaggatttaattcatttatgttcagagttaatattgatatgtgaggttttgttcctgtcatagtgttaattgttaactagttgctttttagtgtcaattgtataattattttataagatgtgagttttatacct

SEQ ID NO: 1502 - DNA, 601 bp, Human
tctgctggtctagtctgctgttcaagctttcaactgtattttgtaattcctacaatgaatttttcatttctggaatttctgtctggttttctaaaaaatagctttctctagtaaaattttaatttagatcctatatttttccgatttctttgtgttggttttttgactttctcttggatcttattgcgcttctttaaaatcaatattttgaattccttagctggtatttcaaggatttcattttctttagggtccactgctggagagttagtgtgagtctttggggatgttgcagcgctcttttttttttttttttttttaatacttctagagttgttactctgtttcattctcatctggataaactatctcttctttatttttgaatttactttggcaggatttttttttttcccttgagaatgtgaatataacgtatgttgtatatagttgtttgacttcagttctgggtactttcagtgacagagactctgagtttcttggttatagttggcctttttgtggtagctttctcaaatgctagtgatagtaatgatgtgcttgggtgtgtgagcagcatcctcaccgtctcccgcggggc

SEQ ID NO: 1503 - DNA, 601 bp, Human
tctttggggatgttgcagcgctcttttttttttttttttttttaatacttctagagttgttactctgtttcattctcatctggataaactatctcttctttatttttgaatttactttggcaggatttttttttttcccttgagaatgtgaatataacgtatgttgtatatagttgtttgacttcagttctgggtactttcagtgacagagactctgagtttcttggttatagttggcctttttgtggtagctttctcaaatgctagtgatagtaatgatgtgcttgggtgtgtgagcagsatcctcaccgtctcccgcggggcctggaaggcagagttctcaggaagttattttgttctcccttgctttgcactttggcagcagaatttatattgggttgtgcaggccagcaggtggtatttatgggtaaaaaccagctgcagtggaatccgatgggtgggtctatgagtctctgtgcttgacctttgtttaatgggggaagctctgttgcttcaggcagtggagtggtctgtggaatgcacagtggcctgagctacctgctcagcccctgagtgggggacaaagctggacagaactgaa

SEQ ID NO: 1504 - DNA, 601 bp, Human
tgtaataataatagaaataaagggtacaataaatgtaatatgcttgaatcatcccgaaaccatcccacccccagtccaagtccatggaaaaactgtctttcatgaaaccagtctctggtgccaacaaggttgggggctgctgccctaaaattttttatagtgagaaacaaatattaagacctcaatgctggtttaaacaatattacattattttaaattgaggaatcatacattatccacacatccaaggagctcagaagaaattaaaaaaatcatacattagtttttccttaggcaaacratattacatatgtgaatcttagcaaatgttagccatcattttcatagggcctgtgaacaatatttggtcccatttgcaacctaattattttcacattttaaagtggtttatacattttatatgcatttgacccttgaacaacgctagagttaggggcaccaaccccctgcacagttgaaaatccacatttaacatttcactccctctaaccttagctgctaatagcctgctgttgatgggaagctttaccagaaacataaatagtcgatcaacacatattttgcatgttatatgtattaa

SEQ ID NO: 1505 - DNA, 601 bp, Human
ctgtgcgcctgctgcgccccacgcgcctcccccctcgcgcctccccccttcgcgcctccctgtaccctgcataccccgtgagcctgctgcgccccatgcgccttccgcgtctccagccctcatgcgcctccagctgcgcatctccctaggcgggtacctcagcaccgctgagcccacccccgcccctgctcagtgcctcccagacacgcccactgcgggcgggacagtgggagctgtccaggcgcggagctgtccaggcgcgggagctgtccaggcgcgggagctgtccacgaggcactgwccttggtttcagagcctctgcagggcttctgtgtccttttggctgagccgactgggcaaaagttttagaaaagaccctgggtgttgcagatggagaaggatgatcgtggctgacttttgcttgcaggcagaagaaccacggggccatcagcctggtgctgtgggggcgcgctgactcgtggtccgcccctgccccaagacttcaggtgtatatgggattggatcagctatcatcccgagctcatggcacgtacagtgagccatgtgttaatccatagactaacctttttccttttaaaaa

SEQ ID NO: 1506 - DNA, 601 bp, Human
ctgcgcatctccctaggcgggtacctcagcaccgctgagcccacccccgcccctgctcagtgcctcccagacacgcccactgcgggcgggacagtgggagctgtccaggcgcggagctgtccaggcgcgggagctgtccaggcgcgggagctgtccacgaggcactgaccttggtttcagagcctctgcagggcttctgtgtccttttggctgagccgactgggcaaaagttttagaaaagaccctgggtgttgcagatggagaaggatgatcgtggctgacttttgcttgcaggcagaasaaccacggggccatcagcctggtgctgtgggggcgcgctgactcgtggtccgcccctgccccaagacttcaggtgtatatgggattggatcagctatcatcccgagctcatggcacgtacagtgagccatgtgttaatccatagactaacctttttccttttaaaaaattagttgttttgtataatgtagcgagcactgtttccaacaaaaatctaggatcttggcagtaaccactacctgttttactctttcctctttcacttttcgctaggagtaatcattagctcccatcttgtatt

SEQ ID NO: 1507 - DNA, 601 bp, Human
ccacggggccatcagcctggtgctgtgggggcgcgctgactcgtggtccgcccctgccccaagacttcaggtgtatatgggattggatcagctatcatcccgagctcatggcacgtacagtgagccatgtgttaatccatagactaacctttttccttttaaaaaattagttgttttgtataatgtagcgagcactgtttccaacaaaaatctaggatcttggcagtaaccactacctgttttactctttcctctttcacttttcgctaggagtaatcattagctcccatcttgtattaatttttttttttttttactgtatctaatttccaaaaaaaaaaaatctgtgtgtttgcaactaagttatcttcctatgtgtaactttttgggacttaagtgataacagtaatattactaaaaatcaaccgtattgttgtttttcactgtggtttattccttctgactgctgtgatattttgtgtggatctgctgaagttaatttatccactcttctgttgatgggcctttggtcatttccaggtttttgctcttctgaagagcatgagatattctttcacattttctgctgtgcatgttccat

SEQ ID NO: 1508 - DNA, 601 bp, Human
cgcgctgactcgtggtccgcccctgccccaagacttcaggtgtatatgggattggatcagctatcatcccgagctcatggcacgtacagtgagccatgtgttaatccatagactaacctttttccttttaaaaaattagttgttttgtataatgtagcgagcactgtttccaacaaaaatctaggatcttggcagtaaccactacctgttttactctttcctctttcacttttcgctaggagtaatcattagctcccatcttgtattaatttttttttttttttactgtatctaatttccaaaaaaaaaaaatctgtgtgtttgcaactaagttatcttcctatgtgtaactttttgggacttaagtgataacagtaatattactaaaaatcaaccgtattgttgtttttcactgtggtttattccttctgactgctgtgatattttgtgtggatctgctgaagttaatttatccactcttctgttgatgggcctttggtcatttccaggtttttgctcttctgaagagcatgagatattctttcacattttctgctgtgcatgttccatatgtgcatggttttctcttttatatagacct

SEQ ID NO: 1509 - DNA, 601 bp, Human
tgtgttaatccatagactaacctttttccttttaaaaaattagttgttttgtataatgtagcgagcactgtttccaacaaaaatctaggatcttggcagtaaccactacctgttttactctttcctctttcacttttcgctaggagtaatcattagctcccatcttgtattaatttttttttttttttactgtatctaatttccaaaaaaaaaaaatctgtgtgtttgcaactaagttatcttcctatgtgtaactttttgggacttaagtgataacagtaatattactaaaaatcaaccrtattgttgtttttcactgtggtttattccttctgactgctgtgatattttgtgtggatctgctgaagttaatttatccactcttctgttgatgggcctttggtcatttccaggtttttgctcttctgaagagcatgagatattctttcacattttctgctgtgcatgttccatatgtgcatggttttctcttttatatagacctgagtggagtaactaggtcatagggcacacgaatgttcaattttaggacataatgtcctgctgacttacatagttgttgaaccagttaacatttcac

SEQ ID NO: 1510 - DNA, 601 bp, Human
agcactgtttccaacaaaaatctaggatcttggcagtaaccactacctgttttactctttcctctttcacttttcgctaggagtaatcattagctcccatcttgtattaatttttttttttttttactgtatctaatttccaaaaaaaaaaaatctgtgtgtttgcaactaagttatcttcctatgtgtaactttttgggacttaagtgataacagtaatattactaaaaatcaaccgtattgttgtttttcactgtggtttattccttctgactgctgtgatattttgtgtggatctgcygaagttaatttatccactcttctgttgatgggcctttggtcatttccaggtttttgctcttctgaagagcatgagatattctttcacattttctgctgtgcatgttccatatgtgcatggttttctcttttatatagacctgagtggagtaactaggtcatagggcacacgaatgttcaattttaggacataatgtcctgctgacttacatagttgttgaaccagttaacatttcactagcaatacaggagagctctgagccacctcatggctgacacttggtatttaatttttgccaga

SEQ ID NO: 1511 - DNA, 601 bp, Human
gactgctgtgatattttgtgtggatctgctgaagttaatttatccactcttctgttgatgggcctttggtcatttccaggtttttgctcttctgaagagcatgagatattctttcacattttctgctgtgcatgttccatatgtgcatggttttctcttttatatagacctgagtggagtaactaggtcatagggcacacgaatgttcaattttaggacataatgtcctgctgacttacatagttgttgaaccagttaacatttcactagcaatacaggagagctctgagccacctcatgkctgacacttggtatttaatttttgccagagggatggttgtaaatggtataccattttggtcttgatttgaaattccttgatcaccagtaacattgaacatgtcttaacatatttattgatgtacatttttctttgatttgcttgatcatgtcttgttcattttatattgggttattgtgtgtgacctagattagaattttttcttttcattggatattaagatccaccattgtgtggctaggagtgggtttttccttctctctcctttccagcatggtgtgtgctttctcagtcagaggt

SEQ ID NO: 1512 - DNA, 601 bp, Human
gtcttgttcattttatattgggttattgtgtgtgacctagattagaattttttcttttcattggatattaagatccaccattgtgtggctaggagtgggtttttccttctctctcctttccagcatggtgtgtgctttctcagtcagaggtaattcatcgtcctttatttcctggaattatacagacattcttttcttgtttgtttgcatgtgaatgtgtatgtagagattcttgatgctggttctttgccagttctgtgtttttcctagtttataacttacttccgttttctttaagctrttttttgatgagtataaactcttaaattgaataggtcaacctcattaatctttttgagtcttaagaaatctttctctatcttaagatttctgccaagttttgaagtttggattttgatgtttacatctttaatccatttagacaggggtgtccaatcttttggcttccctaggccacattggaagaataattatctttggccacctaaaatacactaatactcatgatacttaatgatctaaaaaaaatcacaaaaaagatctcataatgttttaagaaagtttacaagtttgtgttggg

SEQ ID NO: 1513 - DNA, 601 bp, Human; identical to SEQ ID NO: 314

SEQ ID NO: 1514 - DNA, 601 bp, Human; identical to SEQ ID NO: 315

SEQ ID NO: 1515 - DNA, 601 bp, Human; identical to SEQ ID NO: 316

SEQ ID NO: 1516 - DNA, 601 bp, Human
gtttttgttttatctgagtgtacctcttatgtcacgttgctgaattgacagttgtgtcttctaccacctaggaaaaaattgctttccaaaataaaatgaatagcaacttgttttcaatgggtcagaaatcaccaactacagcccatggttcaaagcctgccctggcctgtttttgtacaaccccaggactaagaatggttttcacatttttacaggattgttacaaaacaaagaggaatatgccacagagacctatgtgacctgcaaaacccaaaatgtagataccacatggttctttgtaaaaaaaaaaaaaaaaaaaaaaggtgctgatctgtgttctaaatagtttttggggtgggaatggggaggtatagtctgtgtttttctcaaaacaatgacatttaatttctcttagaagcagattgaagatgcatgagaaacatttgtactttgtactctcttacctcttcaggtgtaattggcagctggggctttattcattgagttttcatttattgagagcctattgtgagctaagcagtaggaattttgttaaattttggaatgctttcagggagcctatagactaatggtgtgaagg

SEQ ID NO: 1517 - DNA, 601 bp, Human
cagggttataaaagtaagattattatatataaaacagcattaactcaatgcgtggtgtgttgcagctggcaaacaacctcgctccccaggctgctaaattcgtggtcttatgaatgtctccattgctgtgtttgctgtagcaggaagtgggagggtgttccccagtagccttgactgtttaccaatgcacactccagttctgtggagtgctgtgtgaggcatgtcttctcttccctcctggagtagggagacagccagtagttgctacctgccccgagcagggtgcttgcagatcttgcckatgtggaatcctctaagtgtcttggtgaaatgcagctgttttcagaatgaagagttctttcattttcccttcttgccatatgccatcttgctcccttttccatcataggcttttattttgctggttagagaattgcatcttgtcttgcatcctacccagtccactgactcactcccctcttgggttaatgttttcatatgatcttgctgtgggatgacaagctttagatttgcaggataatgggcacttgtggctttttactgtaacccaattatagtctgtggcaataattttctttta

SEQ ID NO: 1518 - DNA, 601 bp, Human
aagctccatgtgctggtaccctctgagcactagaggttctaacttcctccattattagtagaaacacttaggtgtctgagaagtattttaggcgacaggcaactttgctttgaggatatggtcaaaatgagttcaagtgcctttgaggctgtgagtaggtgtaggtcgtttgattcactctattagctctccatgaatctctgacagcaggactggggaaaaaggttagtgggttagagcattcctgcagatttgatagcctatttctaagagaaatttgaaagctaaatattaagcagtyaacttttgtaaatagacctgtctgtgaattgcttcagtctaaaagataaaattttgggaaacttatccacagaaaataataaaactatctactttgaaatgatttcagagaacatgaagttttagaatattctttggaagaggtaattaaaatgatgccagtgtattattttggaaataaaacttacaggaatgtttcacatagtcatggttcacttggtgaccagggccttttttactctgggggggattcctttctgggcttgagttcttgctgtgatgcggaagttgggtgccccta

SEQ ID NO: 1519 - DNA, 601 bp, Human
ctgtgagccagttaaacttcttttctttataaattacccagtctcaggtatttatagcagtgcaaaaacaacctaatacagactgcttgggactgggctggcttttttggcctgctgccagcgatgggccacaggtgggagactcactgagttaagggcattagaacttggtgggtcctgctattgcctgctatgctgtggagctcaggctgcacctctttttaccatgtgggctctttgatgtggtagaggcgcctctgtccctccccagaatgttgccctggaggcccgctgatcaccrttggggccagtgcttgtctcagctgttggagagcctgaatatgtgcttgcctgacccagctccacccagctttccttcctcaatctgccttgctggcagaacacaagacagtgatgcttaggtgtcccatggccccacccattgtctgggacatgggagtagcctcctcgttaacaaaagccaagcataaatcctgttgccaccactgcagctgcctctttcctgcaagtaccacttcctggccaggagatgaacttgcgtagcccatctgctgagacaagtgcacaattgcacagtgct

SEQ ID NO: 1520 - DNA, 601 bp, Human
attactaagggagaagaacaaacaaaatctggaaaatgtatttgaggacataattgatgtaaacttctttagtttagcaggagatctagacctccaaatataggaagctcaaaaaattctaaggaaatatgttgcaaggaggacttcaccacaacatatagccatgagactgtatgaggtcaacatgaaggaaaaaatcctatccacgagaaaagtatctaatcacctataaagaaaatcccatcaaactaataggggacttctcaggagaaacttaagagccagagagattgggtttctsttttcaaggtgcttaaggaaaaaaaatctgtcaaccctgaattttgtatcctgccagaataagtttcatgtatgaaggaaaaataaagtctttctcagacatgcaaatgctgagggaatttgtcagtactagatggaccatacaattaatgcccaaaggaggtctatacagggaaacaaaagtttgatacttgctatcataaaaacacacaaaagtataaacactcttataaaacaattattcaaacaagaccacaaagcaactaggaaacagttagcattatgacaggaataaaacctc

SEQ ID NO: 1521 - DNA, 601 bp, Human
aaattggattcaggaccacgtagacctaacagatatttatagaacattctccccacagccgcagaacatatattcttctcatcagtgcatggaacgtttttcgagatggactatatgtcataccaaaaaacaagtctcaataaattgaaaaaaaccaaaatgataccaagtatcttctcagaccacagtggaatgaaactagaaatcaattcacagagaaactctcataactatacaaataattggaaattaaatagcctgcttctgaatgaattttgagtcaacaatgtagttaagatgraaattaaaaaaaaattgaaacaaatgaaagtggatacacagcataaaacctgcgggatacagcaaaagcagggctaagtgggaagtttatagtgttaaatgcctacatcaaaaatagagatcacaaattaacaacctaatatcacacttcaaggaactagaaaaaaaagaaaaaaccaaattgaaacctagcagaacagaagtaacaaataccagagcagaactaaatgaaatggagaccaaaaaatgcagtacaaaggataaaaaaaatgagaagttggttctttggaaagataatatt

SEQ ID NO: 1522 - DNA, 601 bp, Human
cgtagacctaacagatatttatagaacattctccccacagccgcagaacatatattcttctcatcagtgcatggaacgtttttcgagatggactatatgtcataccaaaaaacaagtctcaataaattgaaaaaaaccaaaatgataccaagtatcttctcagaccacagtggaatgaaactagaaatcaattcacagagaaactctcataactatacaaataattggaaattaaatagcctgcttctgaatgaattttgagtcaacaatgtagttaagatggaaattaaaaaaaaattgaaacaaatgaaagtggatacacagcataaaacctgcgggatacagcaaaagcagggctaagtgggaagtttatagtgttaaatgcctacatcaaaaatagagatcacaaattaacaacctaatatcacacttcaaggaactagaaaaaaaagaaaaaaccaaattgaaacctagcagaacagaagtaacaaataccagagcagaactaaatgaaatggagaccaaaaaatgcagtacaaaggataaaaaaaatgagaagttggttctttggaaagataatattcatagactgttggtcaga

SEQ ID NO: 1523 - DNA, 601 bp, Human
gcgggatacagcaaaagcagggctaagtgggaagtttatagtgttaaatgcctacatcaaaaatagagatcacaaattaacaacctaatatcacacttcaaggaactagaaaaaaaagaaaaaaccaaattgaaacctagcagaacagaagtaacaaataccagagcagaactaaatgaaatggagaccaaaaaatgcagtacaaaggataaaaaaaatgagaagttggttctttggaaagataatattcatagactgttggtcagattaaccagaagagagaggattcaatcagaaatargaaagtagacattacagctgataccacaaaaaagatcataagagacttctgtgaacatctgtgtactcacaactgagaaaatttagaggaaatgtgtacatttctggaaacattcaagttcctgagattcaaccaggaagaaatagaaattccaaaaagaccaataacaagtattgggattgaatcagtaatttaagaaaaacaaaacaaacaaaacaaaacaaaacaaaaacctcccaacaaaaaaagctcaggaccagacagattgacagctgaattctcccagaggcacagggaaga

SEQ ID NO: 1524 - DNA, 601 bp, Human
gtgttaaatgcctacatcaaaaatagagatcacaaattaacaacctaatatcacacttcaaggaactagaaaaaaaagaaaaaaccaaattgaaacctagcagaacagaagtaacaaataccagagcagaactaaatgaaatggagaccaaaaaatgcagtacaaaggataaaaaaaatgagaagttggttctttggaaagataatattcatagactgttggtcagattaaccagaagagagaggattcaatcagaaataagaaagtagacattacagctgataccacaaaaaagatcatmagagacttctgtgaacatctgtgtactcacaactgagaaaatttagaggaaatgtgtacatttctggaaacattcaagttcctgagattcaaccaggaagaaatagaaattccaaaaagaccaataacaagtattgggattgaatcagtaatttaagaaaaacaaaacaaacaaaacaaaacaaaacaaaaacctcccaacaaaaaaagctcaggaccagacagattgacagctgaattctcccagaggcacagggaagaactagcacaaatcctactgaaactgttaccaaaaatcaga

SEQ ID NO: 1525 - DNA, 601 bp, Human
gatatgatcttatacctagaaaactctaaagtttcctccaaaagtctcttagatttgatacgtgaattcagtagtttcaggatacagagtcattgtacaagaatcaataacatttctacacaccagtaatgatcaagctgagaatcaaatcaagaagtcaatcccatttataatcactaaaaaaaaaaaacccactagaaatacatttagccaaggaggtgaaaaatctctacaaggaaaactgtaaaacactgatgaaagaaattgtagatagcagaagtgggaaaacatcccatgttcrtgaattggaagaatcaatatcattaaaatgattatattgcccgaaacaatccacagattcaatgcaattcctatcaaaatgccaacgtcattttttatggaattagaaaaagtcctaaaattcatgtggtcccccaaaaaatcttaatagccaaaccaatcttaaggaaaatgaacaaagctagaggcatcacaatacccacctacagattttactggagggctatagtaatcaaaacagctagtactgatagaaaaatagacacacagattaatggaacagaatagaaaacccagagtc

SEQ ID NO: 1526 - DNA, 601 bp, Human
gtggggtggggggcggggggagggatagcattaggagatatacctaatgctaaatgacgagttaatgggttcagcacaccaacatggcacatgtatacatatgtaacaaacctgcacgttgtgcacatgtaccctaaaacttaaagtgtaataataataaaattaaaaaaaaaagtttaggaaaaaaaaaataaactgcatatatggaacgtaataaaaaaaaaccccacaatgagataccatcttataccagtcaaaaatggcaattattaaaaagtcaaaaaacaacagatgttggcaragttgcagaaaaaaaagagaacacttatacaccattggtgggaatgtaaattagaatgacctttatggaaaatagtatggaaattaatcaaagaactaaaaatagaactaccatttgacccagcaatctcactactgggtatctacacaaagtaaaagaaatctgtctgtcaaagagatacgtgcactcgtctgtttattgtggcactattcacagtagcaaagatacggaataaacgttaagtgcccaccaacggatgactaggtaaagaacacacacacacacacacacacacacacg

SEQ ID NO: 1527 - DNA, 601 bp, Human
aaggatggattgaaatacccacaggaggaactcatcttcacagtttatggaacaaatatagaacaaatatttactgagctcccactatgttgtaggcatcatctttagcctgcagtgacaaacccttgacctcaaggagcccctattatagtggggggaaaatgacaaaagtcaacagatggcagtacctagtatcatacatcacagtgctgtgaacaaaagtgaggctgagtatgggagacagagagaggtagagagtgctgttttaggtaaaggtgtcagaagaggccttactaagggygatgtttcatcagagacctgaatgaagtgagggaaagagccatgtgtatatttgggtaagcacatctcaggtagagaggacttttgagtttcaggagggtagaattgcatcaagaggtgagtgtggctgcgttgagtgaggagagtggtgggttagggcggtgtcatgaaggagttggaatttccttctcagtgtaatgggaagctgctttgaacagggagaggtgtggcctgatttaattctgaagtgctaatcctgtgcttgtggagacatgggctgaggtagtagggcactgaagct

SEQ ID NO: 1528 - DNA, 601 bp, Human; identical to SEQ ID NO: 317

SEQ ID NO: 1529 - DNA, 601 bp, Human; identical to SEQ ID NO: 318

SEQ ID NO: 1530 - DNA, 601 bp, Human; identical to SEQ ID NO: 319

SEQ ID NO: 1531 - DNA, 601 bp, Human; identical to SEQ ID NO: 320

SEQ ID NO: 1532 - DNA, 601 bp, Human; identical to SEQ ID NO: 321

SEQ ID NO: 1533 - DNA, 601 bp, Human; identical to SEQ ID NO: 322

SEQ ID NO: 1534 - DNA, 601 bp, Human; identical to SEQ ID NO: 323

SEQ ID NO: 1535 - DNA, 601 bp, Human; identical to SEQ ID NO: 324

SEQ ID NO: 1536 - DNA, 601 bp, Human; identical to SEQ ID NO: 325

SEQ ID NO: 1537 - DNA, 601 bp, Human; identical to SEQ ID NO: 326

SEQ ID NO: 1538 - DNA, 601 bp, Human; identical to SEQ ID NO: 327

SEQ ID NO: 1539 - DNA, 601 bp, Human; identical to SEQ ID NO: 328

SEQ ID NO: 1540 - DNA, 601 bp, Human; identical to SEQ ID NO: 329

SEQ ID NO: 1541 - DNA, 601 bp, Human; identical to SEQ ID NO: 330

SEQ ID NO: 1542 - DNA, 601 bp, Human; identical to SEQ ID NO: 331

SEQ ID NO: 1543 - DNA, 601 bp, Human; identical to SEQ ID NO: 332

SEQ ID NO: 1544 - DNA, 601 bp, Human; identical to SEQ ID NO: 333

SEQ ID NO: 1545 - DNA, 601 bp, Human; identical to SEQ ID NO: 334

SEQ ID NO: 1546 - DNA, 601 bp, Human; identical to SEQ ID NO: 335

SEQ ID NO: 1547 - DNA, 601 bp, Human; identical to SEQ ID NO: 336

SEQ ID NO: 1548 - DNA, 601 bp, Human; identical to SEQ ID NO: 337

SEQ ID NO: 1549 - DNA, 601 bp, Human; identical to SEQ ID NO: 338

SEQ ID NO: 1550 - DNA, 601 bp, Human; identical to SEQ ID NO: 339

SEQ ID NO: 1551 - DNA, 601 bp, Human; identical to SEQ ID NO: 340

SEQ ID NO: 1552 - DNA, 601 bp, Human; identical to SEQ ID NO: 341

SEQ ID NO: 1553 - DNA, 601 bp, Human; identical to SEQ ID NO: 342

SEQ ID NO: 1554 - DNA, 601 bp, Human; identical to SEQ ID NO: 343

SEQ ID NO: 1555 - DNA, 601 bp, Human; identical to SEQ ID NO: 344

SEQ ID NO: 1556 - DNA, 601 bp, Human; identical to SEQ ID NO: 345

SEQ ID NO: 1557 - DNA, 601 bp, Human; identical to SEQ ID NO: 346

SEQ ID NO: 1558 - DNA, 601 bp, Human; identical to SEQ ID NO: 347

SEQ ID NO: 1559 - DNA, 601 bp, Human; identical to SEQ ID NO: 348

SEQ ID NO: 1560 - DNA, 601 bp, Human; identical to SEQ ID NO: 349

SEQ ID NO: 1561 - DNA, 601 bp, Human; identical to SEQ ID NO: 350

SEQ ID NO: 1562 - DNA, 601 bp, Human; identical to SEQ ID NO: 351

SEQ ID NO: 1563 - DNA, 601 bp, Human
tttattgactttctgccatgtggcagcccaggtggggatggaggtttcttggtgagccacactcagtgccttgcccctgcggtgctcaggaagtttcatgagaggagccaactgctgtgacttgtgtctacggaccgtgagatgagggaaatgcatgaaaaattactaatttttggccaggcgcggtggctcacgcctgtaatcccagcactttgggaggctgaggcgggtggatcacgaggtcaggagattgagaccatcctggctagcatggtgaaaccccgtctctactaaaaatacaaaaaaaaaaaaaaattagctgggcgtggtggcgggcgcctgtagtcccagctactggggaggctgaggcaggaggatggtgtgtacccgggaggcggagcttgcagtgagccgagatcatgccacttcactccagcctgggtgacagagtgagactcggtctcaaaaaaaaaaaaagaaaaattactaattttcataaatgtccagtatcgggggaaccagcccccgatttttcaacgtaggttcttttctatttccctaagtgttggccggtctgagaaataaggggaaagagtacaaa

SEQ ID NO: 1564 - DNA, 601 bp, Human
aaaaattactaatttttggccaggcgcggtggctcacgcctgtaatcccagcactttgggaggctgaggcgggtggatcacgaggtcaggagattgagaccatcctggctagcatggtgaaaccccgtctctactaaaaatacaaaaaaaaaaaaaaattagctgggcgtggtggcgggcgcctgtagtcccagctactggggaggctgaggcaggaggatggtgtgtacccgggaggcggagcttgcagtgagccgagatcatgccacttcactccagcctgggtgacagagtgagactyggtctcaaaaaaaaaaaaagaaaaattactaattttcataaatgtccagtatcgggggaaccagcccccgatttttcaacgtaggttcttttctatttccctaagtgttggccggtctgagaaataaggggaaagagtacaaaagagagaaattttaaagctggtgtccgggggagacattacatgttggcaggttctgtgatgcccccgagccgcaaaaccagcaagtttttattagcaattttcaaaggggagggagtgtacgaatagggtgtgggtcatggagatcacatgcttcaa

SEQ ID NO: 1565 - DNA, 601 bp, Human
tgggtcatggagatcacatgcttcaaggatgactagaggtcacaaggcagaaggtcagggcaggatcacaaggtcagcgcgaaactagaatcactaaataacttccatgtcccactgtgcacacattgtgagggttcaagagcagagaaccggtttaactagaattcgccaggctggaatttccaaatcctagcaagcctgggggcgctgcaggaggccagggcgtgtttcatcccttatctgcaactgcataaggcagacacccctagagtggccatttaagaggcgcccctgccttccycccgggaatgcattcttttcccagggctgttaattattaaaattccttactggggaaagaattcagcgatatttctcttacccgttttcggtaataagagaaatatggctctgtcctcaccggcccacagtcagccagactttaaggttatctcacttgttccttgaaaatcactgttatcctgttcttaaggtgcccagatttcatattgttcaaacacacatgctttacgaacaatttgtgcagttaatgcaatcatcacagggtcctgaggcgacatacatcctcagcttacgaaga

SEQ ID NO: 1566 - DNA, 601 bp, Human; identical to SEQ ID NO: 352

SEQ ID NO: 1567 - DNA, 601 bp, Human; identical to SEQ ID NO: 353

SEQ ID NO: 1568 - DNA, 601 bp, Human; identical to SEQ ID NO: 354

SEQ ID NO: 1569 - DNA, 601 bp, Human; identical to SEQ ID NO: 355

SEQ ID NO: 1570 - DNA, 601 bp, Human; identical to SEQ ID NO: 356

SEQ ID NO: 1571 - DNA, 601 bp, Human; identical to SEQ ID NO: 357

SEQ ID NO: 1572 - DNA, 601 bp, Human; identical to SEQ ID NO: 358

SEQ ID NO: 1573 - DNA, 601 bp, Human; identical to SEQ ID NO: 359

SEQ ID NO: 1574 - DNA, 601 bp, Human; identical to SEQ ID NO: 360

SEQ ID NO: 1575 - DNA, 601 bp, Human; identical to SEQ ID NO: 361

SEQ ID NO: 1576 - DNA, 601 bp, Human; identical to SEQ ID NO: 362

SEQ ID NO: 1577 - DNA, 601 bp, Human; identical to SEQ ID NO: 363

SEQ ID NO: 1578 - DNA, 601 bp, Human; identical to SEQ ID NO: 364

SEQ ID NO: 1579 - DNA, 601 bp, Human; identical to SEQ ID NO: 220

SEQ ID NO: 1580 - DNA, 601 bp, Human; identical to SEQ ID NO: 221

SEQ ID NO: 1581 - DNA, 601 bp, Human; identical to SEQ ID NO: 222

SEQ ID NO: 1582 - DNA, 601 bp, Human; identical to SEQ ID NO: 223

SEQ ID NO: 1583 - DNA, 601 bp, Human; identical to SEQ ID NO: 707

SEQ ID NO: 1584 - DNA, 601 bp, Human; identical to SEQ ID NO: 708

SEQ ID NO: 1585 - DNA, 601 bp, Human; identical to SEQ ID NO: 709

SEQ ID NO: 1586 - DNA, 601 bp, Human; identical to SEQ ID NO: 710

SEQ ID NO: 1587 - DNA, 601 bp, Human; identical to SEQ ID NO: 711

SEQ ID NO: 1588 - DNA, 601 bp, Human; identical to SEQ ID NO: 712

SEQ ID NO: 1589 - DNA, 601 bp, Human; identical to SEQ ID NO: 713

SEQ ID NO: 1590 - DNA, 601 bp, Human
tattgctcattctttctgtgggaaatagacaggaataaacaggtttagacttttgttcttctttgtcactaatctttcacaaccctttagtatttcaacacagtttaactcactcacagttgttgattcctagtccctagttgatttattttttaaatctttaaaaaaataaaaacaaaacatttgttttccaaatgctgtttttccataaattagaaagtatgtaactgtgatgaaaagtcttttgatgatagcaaagtaagaactcattatgcattcaggtctattaccatgttagtckggcccaagccaaactcaatgaaaaattaatgtttccaaaggatgtccttacctcaaatatgtttgaaggctcattgttgtactgattggatattatttctgattggtcactgcaccacttgagtccacccagaaagctgtctgtatccaagtcgttcacatctagttcagaaagatcaagttcaggaagatctgggcaaagaggctggtcttcaccaaccagagcagcacactgcaggaggcagaaaaaaaaaatttaaaaaagcttccattaaccacaggaatttattaaactgcaata

SEQ ID NO: 1591 - DNA, 601 bp, Human
gagatgacatatattaagcatgagtataccaaaatgttggccattattgtcattactattattgttatcaacattaatatattcatcattctctcatgatttaacaaacatttattcagcatgtattatatgctgggttccagcaaaactcagttaatattttaaacttggctttcttaagactcagatttcaaccaaataacatggaagtataagaaatgtctttgctgatgaataagaaaagtccagcacatagtaggtgctcagaaaacattagatgatgatgatgatggcactggcrgttgtgataaagaaaactagccgatatgtcatccttcgtttaattcacttgccagagtactcactaaatgtttgttcctataaaaaataatgtatttcaagtaaatgagtactgatcttgtgggaaagaattccttttctcaaagtaacactttaataggaatagattaacattctttattatagggtaggcttataataagagtccggagtcacggaggtaattcttgctactgaaaagtaaatgaattttgactgatttataagtatacagtagattagtcaagtttagcaattccca

SEQ ID NO: 1592 - DNA, 601 bp, Human
aaagccaaatgaagaaaagtaaagtatctatattcccactagaataaccaagtagccttgaaagcgtccacattcatttccttgattgcatatagcaggataatttacacacaaatacaaaaccaccactcacccttttctgctacaaagttcacagtttcaggcttcctgagagttccagcaatgaccaaacatgaacgctggctacagctgtgagagtccttctccccccatcagcaaaggcagtcctcagaacgtattacaagtaatgacctagagacgactgcattctcacttgccrtcattctaacgaaccccaagtagcttcattcagaagtaacagacgaatgaatgaaagatgcccattcagttgtatcatggaggcattaaagcaggtgttaaaataaaccagggacaaggttgcccacagtgacccagaaaggccaatatgctatttaaactaaccccatgccatccatctttacagactgctgtgctgcaaaagtagtcctttattctcctccttcaaacaatgcacaaaggcaacagagggaaggaagttatgttgcaatattctgaaacataaatcttgctaccagcc

SEQ ID NO: 1593 - DNA, 601 bp, Human
cccaagataagccagatgttatcaagccgagaagtctaaaaccacagtgcttaaatgaggtgtgtagatgaacacacacacacacaaacgaacaacactatttagtctccctgcaagataagccgacaggagaggctgaaaataaagcagcacacaggctgggtcagattgttgcttcctgatttatgactctccaagatgaacatctaactgatttatacccagaatttggaattttgtggtagactacaaatgcaaagataagtacaacataaatttttaaaatactccataagtctcyatgagtttcaacattcttcaatgttcttatgttacagccaattatctctccacttaaatggctattattttcttacttgaagtctatgttctctgtaagtgtcattaccaagtgtggcaaaaatctggctgtgggccgtaaatttaatttaaatgacaaacatttattgattgcaaattggaaatcccagaaatcttataaaagtgattattgtaaattaattcagtcctcccacataacaaaaaagaatttattcttccaatgattaaattaaggtgaggttgtatatacatgcattct

SEQ ID NO: 1594 - DNA, 601 bp, Human
cacaatgctcaagttccacgtgttaaatcacaattgctttctactaaagttccaagctacccatttttattaacagttactttattaaatccttaataacacagatagcatagttagttaatttgtgtgttgagccatggatgttaatttgtaaacataataacatactgcaatcatttgcataatagcattttaatctttttagtaaaagctgtaattccctacaaagtacactgcagtagaaactaagtgactattggtaataatacaaaaggccttaaaattctgatcctattatagkgctggagcatacccaaactgcttccataatctctgaaatgttactgttctctgatttaggtgtctgtgtcaagaataaaaatgaagtataactggtagcagtagactatttcctaaatgtaatttagtattcactaagcaccagcattttgcaaatagctctgaggctttccttcaaagttcagagctccagctatgcatattgtgtgaggaggaccctggaactcactctcaactctgtgctgaagagagggctctgataaatcatgctgatttggcgcagggaagggcatcggccacc

SEQ ID NO: 1595 - DNA, 601 bp, Human
aaatgtgggatgaaatgaaggaaccaggcaccttgctaaagctagatatcaaaaatttgcataagtagttttgcaaccacagaggtgctatttggaacaaaataaattgcttgtattgtatgcaagggtacaaaccttgaccaactttgcggtgtcttccctgcttgtacatttcttaagcacatccagatattcctactaagaagttcaagttagtatccctcaatagggagacctaaaaagataattgtttgtggacttagaagtcctcaacatctttatttgagaattaagaaacatsagtccaaaatatttgaaatatagaattagttctccaggatgttcttgtaattcttttgtttcttttttgtttatttgcttaatattaggtcatatccctagctctttttttgagatccagcacagaagtcagtgactggaatcctggctctcttctgaaacatttgaattacagtgttttggaatttcctattctaacaaagtttgttatccaaacctgtatctctttctacttttcctgttgggctaaagtgaaggtgttgtcggtctgtctagtaaatccaacctacgagataacata

SEQ ID NO: 1596 - DNA, 601 bp, Human
tggtggcaggcacctgtagtcccagctactcactcaggaggctgaggcagaagaatggcatgaacccaggaggcagagcttgcagtgagccaagattgtgcctctgcactccagccggggcgacagagcgagactccgtctcaaaaaaaaaaaaaaaaaaaaaaaaaaaagaaaaaaatgtgaccagccatatcccaagtgatatgggatgaaaagaaaagtgttggtaataatccccagtaatattgcatagtgctttagagaaactgaagtactatctcaaggtgttgaagttagcagyttaagcgggtaatacagattgcaatgcctttttgtcttcaggccattggaagaaagatgaggaaggttgaacacatctaagaatttctcaaaagtgaaaacagacttgcatcagtttctaccatgcctctggtgcagaaatatcagccactgtggaaactggtctctgagtttctccgcagctaccggcaagcacatttcattcgtcctttatctttttagtaaggtgcaaatttggttcaataatttttttctgcatctctttagatgattctctatctcaactaagtttgaataaaat

SEQ ID NO: 1597 - DNA, 601 bp, Human
tcctggctaacacggtgaaaccccgtctctactaaaaatacaaaaaaaaaattagccagtcatggtggcaggcacctgtagtcccagctactcactcaggaggctgaggcagaagaatggcatgaacccaggaggcagagcttgcagtgagccaagattgtgcctctgcactccagccggggcgacagagcgagactccgtctcaaaaaaaaaaaaaaaaaaaaaaaaaaaagaaaaaaatgtgaccagccatatcccaagtgatatgggatgaaaagaaaagtgttggtaataatccccwgtaatattgcatagtgctttagagaaactgaagtactatctcaaggtgttgaagttagcagtttaagcgggtaatacagattgcaatgcctttttgtcttcaggccattggaagaaagatgaggaaggttgaacacatctaagaatttctcaaaagtgaaaacagacttgcatcagtttctaccatgcctctggtgcagaaatatcagccactgtggaaactggtctctgagtttctccgcagctaccggcaagcacatttcattcgtcctttatctttttagtaaggtgcaaatttggt

SEQ ID NO: 1598 - DNA, 601 bp, Human
tggctcacacctgtaatcccgcacttcgggaggccgaggtgggcggatcacgaggtcaggagatagagaccatcctggctaacacggtgaaaccccgtctctactaaaaatacaaaaaaaaaattagccagtcatggtggcaggcacctgtagtcccagctactcactcaggaggctgaggcagaagaatggcatgaacccaggaggcagagcttgcagtgagccaagattgtgcctctgcactccagccggggcgacagagcgagactccgtctcaaaaaaaaaaaaaaaaaaaaaaaawaaagaaaaaaatgtgaccagccatatcccaagtgatatgggatgaaaagaaaagtgttggtaataatccccagtaatattgcatagtgctttagagaaactgaagtactatctcaaggtgttgaagttagcagtttaagcgggtaatacagattgcaatgcctttttgtcttcaggccattggaagaaagatgaggaaggttgaacacatctaagaatttctcaaaagtgaaaacagacttgcatcagtttctaccatgcctctggtgcagaaatatcagccactgtggaaactggtctc

SEQ ID NO: 1599 - DNA, 601 bp, Human
ggtgcagtggctcacacctgtaatcccgcacttcgggaggccgaggtgggcggatcacgaggtcaggagatagagaccatcctggctaacacggtgaaaccccgtctctactaaaaatacaaaaaaaaaattagccagtcatggtggcaggcacctgtagtcccagctactcactcaggaggctgaggcagaagaatggcatgaacccaggaggcagagcttgcagtgagccaagattgtgcctctgcactccagccggggcgacagagcgagactccgtctcaaaaaaaaaaaaaaaaawaaaaaaaaaagaaaaaaatgtgaccagccatatcccaagtgatatgggatgaaaagaaaagtgttggtaataatccccagtaatattgcatagtgctttagagaaactgaagtactatctcaaggtgttgaagttagcagtttaagcgggtaatacagattgcaatgcctttttgtcttcaggccattggaagaaagatgaggaaggttgaacacatctaagaatttctcaaaagtgaaaacagacttgcatcagtttctaccatgcctctggtgcagaaatatcagccactgtggaaac

SEQ ID NO: 1600 - DNA, 601 bp, Human
gccagagactaggtttacttttaaccactgtatccccctaaaatggccagacactaagcatgctaatggatgacaattatattttgatgaatgggtaagtaaataagtgagagatgaacttttaaaatccacaggcaagaagaaatgtgacgatgttgcaaaagttggaaactgagagctttagccagtgaattggttcttgtctaagaaaatgtgggccgggtgcagtggctcacacctgtaatcccgcacttcgggaggccgaggtgggcggatcacgaggtcaggagatagagaccaycctggctaacacggtgaaaccccgtctctactaaaaatacaaaaaaaaaattagccagtcatggtggcaggcacctgtagtcccagctactcactcaggaggctgaggcagaagaatggcatgaacccaggaggcagagcttgcagtgagccaagattgtgcctctgcactccagccggggcgacagagcgagactccgtctcaaaaaaaaaaaaaaaaaaaaaaaaaaaagaaaaaaatgtgaccagccatatcccaagtgatatgggatgaaaagaaaagtgttggtaataatcccca

SEQ ID NO: 1601 - DNA, 601 bp, Human
tatttgtaaaaggcctgtcttcatcactaaccaaaattttcatggagccagagactaggtttacttttaaccactgtatccccctaaaatggccagacactaagcatgctaatggatgacaattatattttgatgaatgggtaagtaaataagtgagagatgaacttttaaaatccacaggcaagaagaaatgtgacgatgttgcaaaagttggaaactgagagctttagccagtgaattggttcttgtctaagaaaatgtgggccgggtgcagtggctcacacctgtaatcccgcacttygggaggccgaggtgggcggatcacgaggtcaggagatagagaccatcctggctaacacggtgaaaccccgtctctactaaaaatacaaaaaaaaaattagccagtcatggtggcaggcacctgtagtcccagctactcactcaggaggctgaggcagaagaatggcatgaacccaggaggcagagcttgcagtgagccaagattgtgcctctgcactccagccggggcgacagagcgagactccgtctcaaaaaaaaaaaaaaaaaaaaaaaaaaaagaaaaaaatgtgaccagccatat

SEQ ID NO: 1602 - DNA, 601 bp, Human
gagtaaggcttggtagggatgtaatgcctggtacctccagagggaagaggaaagggatcggtagcattcttcctgcacatgcctctcccaagggtgcaggatagcccctgaatagcattaccccatgaagcaaggagctatcacttagagatgatggatccaagagagagagagaaaagccacatacaccaagtgtctcaaacaggcaaaaagcgtgtcagtccttccagctggactgaaataccattctcaaatagaaaggtcaacagacctaaaatggtaccaaacagttctcatccayagaagccccaccaagggcacagcactctggtcaggtcagacttgcacactggttaaagaactctccactgacggtcttgctctcttcccttggttggcttcctcttgttttccctccacactccctggccacccagcacttccaatgagcaaactgttattttaatatactgtgtgtaggacatcataaatttcaggtcttccaacctcaaatattctgtcccactgccctgcatttgttggggcagtgggacagatcttggtttggaatagaatattcctctagctaggagaaatgctc

SEQ ID NO: 1603 - DNA, 601 bp, Human
ggcggggtgggcgggggggcagttagtctctgtagtgatattacgatttcgtatgctccagatgaatatttacaagtgagttgtgcattgctggggtggtggcttatttgaggactgggtaggataaatacggaaagccatgaaggagaaaagtataggcgatttcattctaaagtaatgtgggaaattgcttacttaacgataactctactgagctatatttgtcttgaccaacgtccctgtagccaaaaagctttactattgataaggaaaaagaatccagtggtctctttattcaagraaatttcaatagctgtatttttaagggaagatgtaatctaacagattataaaatgaagttcggtatttcatggagcattttcttctttattatcaaagtctacacaggaaacacttacaggataatatataaactccattaaaatctgttagatctaaaactacgtgtttgtgtttgtatatatgcctcacctatttcctcacatgatcaggctttaatccacataggcactggtgcagataaatcaaagaacttaacttgcttaagcaccaaactttttattaaaacttttttatggaa

SEQ ID NO: 1604 - DNA, 601 bp, Human
attcgaaggccttaacgaaagaaaaagatgctcttttgcacatgtgacaacaaaaattcactttgtgccaaagacggccacaaatactttcctaaatttcgggacttaatagtttatcccatgcctggtaaaggcttaatgtaaacacagaccaaaacaaccagtctttaaaatagcatattgtgacaataccgtttatggaaatggtgtctatggaaagtttcctttcagttctcattccttaagactcatttccaatggcactcaaaggaagacagatttaatttctgataactcccarctgcacaccttattttatccctgcttctgcacttaatttgcatggatactctcctttccactgcttggtttcatggagggtgcagagatggcagggcagccagccttgcacacagcctggaatcagcttgtatgtcactggatgaaaggtcaggtgaaaaggctcaccactggcaccattaatctagtcactcagggaccatccagtggttcaagaatagcttgcaggtgagtgatggacagggtcatggctgcctggctgtatcaggggctattacgacagccataaagagaaaggaaa

SEQ ID NO: 1605 - DNA, 601 bp, Human
tccctcatgcagtttataatgcaccttgagagatttagccaaaaagctattacttagaaagctgaaccacaattcgaaggccttaacgaaagaaaaagatgctcttttgcacatgtgacaacaaaaattcactttgtgccaaagacggccacaaatactttcctaaatttcgggacttaatagtttatcccatgcctggtaaaggcttaatgtaaacacagaccaaaacaaccagtctttaaaatagcatattgtgacaataccgtttatggaaatggtgtctatggaaagtttcctttcrgttctcattccttaagactcatttccaatggcactcaaaggaagacagatttaatttctgataactcccaactgcacaccttattttatccctgcttctgcacttaatttgcatggatactctcctttccactgcttggtttcatggagggtgcagagatggcagggcagccagccttgcacacagcctggaatcagcttgtatgtcactggatgaaaggtcaggtgaaaaggctcaccactggcaccattaatctagtcactcagggaccatccagtggttcaagaatagcttgcaggt

SEQ ID NO: 1606 - DNA, 601 bp, Human
ttcactcataggtttcacagatctcttcccacctctaaaattcttagagtagtttgttaatatcaggccaatgctcacatgtttccttagtttttaaggacactgaaggcaggggctaattcattgtctcttttatttatatggtgcctagaacagggctttgtccacattttactatctacattttacccattgtctgattgtgtcacccgggtaagtcttgcctccttatacagctgggcatccccaaaggaagggaatcccaagcccatatacttggtctgtaattatcatggtttcyggcaaaattctaggtacacagcagatgctgaaaaataatgtttggtttaacaatcaagtatggtatgtgtggggtagtataccttcaggagtagcagcaaccagccctggcaggggagaggaaggctaaatcacctaagtatgagttactgagggttcaaaggaaatgatggaggaagatggtgaacatgcactcaagaacaagaggaaagtctttcgcagcagactgtacatggagaacaaaggacagatagagacaatgaccccaaggcttgtggttttagggggaaacagcaaactg

SEQ ID NO: 1607 - DNA, 601 bp, Human
cttctccagagctccatcgtcgcatattgttcatggacttccttccaatagcagccgccccacctgctttacaatctgcgcatcacattcctctctgcgccttccctgaaacatgtcctcttctcattctctcatttttgttaaccaagcccaaattctccaaatcacccaaggttgaaaccacagccatttttcctcccttttttcaccacaacatccaacctatcacttaatatgacaacaatctttattgatccttccttcgggaagtctgccatatgcattccttcctttcattgtyaccatcaccccctaattcaagctctatgacctcaagcctgaaaacctcaacagcttcctcaccaggcccctggttgcaagctctaagataacctttcttcgctgatgccaccagataacttttaagagtccctggtgtctaacaaaccccatattgtctttttttctgctcctcctgacttaaccttgatattctttatgcaagtcacttcacatgcctgggcctcagtttctccattgtgaaatgagcatgctagatgaaatctcccctcatgttaatttagtacaattccaagatccc

SEQ ID NO: 1608 - DNA, 601 bp, Human
ggtaatattagttcttctggttactttctgtaacttggccctgggcaagttacttatttaagcctcactttccaaactgtaaaatgaggtaacactttcaacccatcatggtgattatgagaattagataagactagtttttatttttttaattaaactctgtaaaactatgtttttaacattgtcttaagatgttgagtccagtgctgggcaagcccaaagctactgtagtattattattattggcaagaagaagcctggcgaattatcaaactcaaagcaagagaaaaatctttactaygtggggcaaaaggggatcccttaaatctttcctccagtttatttgccaaataaacaatgttcttgaagacacccctccttatcaagcactccatgacttctccagagctccatcgtcgcatattgttcatggacttccttccaatagcagccgccccacctgctttacaatctgcgcatcacattcctctctgcgccttccctgaaacatgtcctcttctcattctctcatttttgttaaccaagcccaaattctccaaatcacccaaggttgaaaccacagccatttttcctccctttt

SEQ ID NO: 1609 - DNA, 601 bp, Human
gtatctgaagattttgatacagtcaccagacccagcccagaagctgctcaacagctcatgttacccaggtaattttcccagtcccctaaaaatatttccaatttggtttagtaatggtttagatgatcacaagttaaatgtcattcattcattccttcattcaccagctactgagtaccttttatggacataatgttgaactagaaaccagggagttgctaggagaacacaggaaccaaaagaaataaaagccattatccctgcttataatgtaggtgagagaataccatgcagtgttacrtatttactgagctcctattatgtgcaaggaattgtatataagaaaaagatgaatggggcatggtttgactccttggtccagaaacaaaaaaaaggcaaaatatttctgaaaaaatgcataacacaaatgcaacatgatttgctgcccactaaaggaaggggaatgatcacagctacgtgcaatttgtaagaaattgtttatttggggaaatatacatatattccattgcattttaaaaagagttatattcctcactaaagttgtctctcaggagacttatctaacaggcatattctactg

SEQ ID NO: 1610 - DNA, 601 bp, Human
cgtatctgaagattttgatacagtcaccagacccagcccagaagctgctcaacagctcatgttacccaggtaattttcccagtcccctaaaaatatttccaatttggtttagtaatggtttagatgatcacaagttaaatgtcattcattcattccttcattcaccagctactgagtaccttttatggacataatgttgaactagaaaccagggagttgctaggagaacacaggaaccaaaagaaataaaagccattatccctgcttataatgtaggtgagagaataccatgcagtgttayatatttactgagctcctattatgtgcaaggaattgtatataagaaaaagatgaatggggcatggtttgactccttggtccagaaacaaaaaaaaggcaaaatatttctgaaaaaatgcataacacaaatgcaacatgatttgctgcccactaaaggaaggggaatgatcacagctacgtgcaatttgtaagaaattgtttatttggggaaatatacatatattccattgcattttaaaaagagttatattcctcactaaagttgtctctcaggagacttatctaacaggcatattctact

SEQ ID NO: 1611 - DNA, 601 bp, Human
accataataccctgatcaataatttgctacccaaaccagaacactacgacctctaagtacaacatatttcaaactaagggcaaagactcctaacagccctttctcaatgtgctgcagtgggagtggttgagagcactctcatgtttagacagcaataaaacactgttttgtaaacataactagaaatgcaaaataggcaccactttatcttaaacatcaatgcacaaaaacctgtattattcgaaacaaagaatgaacatgctgaagtggaattactgacgtatctgaagattttgatacwgtcaccagacccagcccagaagctgctcaacagctcatgttacccaggtaattttcccagtcccctaaaaatatttccaatttggtttagtaatggtttagatgatcacaagttaaatgtcattcattcattccttcattcaccagctactgagtaccttttatggacataatgttgaactagaaaccagggagttgctaggagaacacaggaaccaaaagaaataaaagccattatccctgcttataatgtaggtgagagaataccatgcagtgttacatatttactgagctcctatta

SEQ ID NO: 1612 - DNA, 601 bp, Human
caatgatcacatcactgcacccagcccaggcaacagagcaagagacaccctaccttaaaaacaaaaaataaacgagtagaatgatggttaccaggggtggggggaggggaaggtatggaaagataaaggtcaaagtgtacaaattgcaattatgtgggatggatatgtctagagatctaatgtaccacatgaggactatggttagtaatattgtactggattctgagagtagattttaggtgctcttactacaaaaaaaagtaactatgtgaggtgatggatgtgttcatttgcttggctrcggtaatcatcactatgtgtttgtaaatcaaaacataatgttctatatcttaaatatatacagtaacaaataatgctatttaaaataagtctctgataacagcagaggaagcaccactaaactcaatggcagagagattacaagcaatgctattgtttcctgataatccttcaaaaaataaatacctcagcaagaagccaaagaagcaaggaacaaaagaaaaattctaaaaagtcaaggaaatctaaataaagagtcaaaagatgaatgcaggaaaacacaagggccagaattcaaata

SEQ ID NO: 1613 - DNA, 601 bp, Human
aattcaaaatatttaaaatgtaacaccacggtggctcacgcctgtaatcccagtactttgggaggtcgaggtgggtggatcacaaggtcaggagatcgagaccatcctggctaacacagtgaaacctcgtttctagtaaaaatacaaaaaattagcccagcgtggtggcgggcgcctgtaatcccagctactcgggaggctgaggcaagacaatggcaggaacctgggaggtggagcttgcagtgagccgagatggcaccactgcactccagcctgggagagagtgcaagacaccgtctcaaaataaaataaaataaaataaaataaaataaaataaaataaaataaaataacaccaaaaaagagaaagaattttcatgtagcctggtcaataaggaatattcaagtagcacagaaaattcaagaagaatggggacctgaaaaagggcttttgagttagacaattaagaaatctttgagtagaaggtggggcatagtagctcaaccctacaatctcagtgctttgggaactctacatgggaggattgattgaggccaggagttcaacagcagcctggccaacatagtaagaccttgtcttt

SEQ ID NO: 1614 - DNA, 601 bp, Human
aggtatataaatatatacttatataaatataaattatatagatttaaagtgtaaatttatatttatattttgtagaataaattaaatataaacataaattaaagtatgtaaatataaatttatataatacaaataaataagtttataaatataaattaaaatagtattgtaataacttttaatactagcccattccagtacatgattcaaatacattatcaactctgtgggctttccagggaatattcccagggaatgtagtaagagaacactcaagcatcatttcaaaaactattctttmggttgcctctgttaattagtgaagagttttaatgcttaaaatgtcagtcccaagttaggccaagacaagattcttaaagatgatgccaacccattcagacacagagccactagcgagccatgtcagacatgatctttggcttgtccaattatctctagttggcctgaatgctgaaagtgtaaggggaaggtacaggtacatttagggtcttccagcaaaggaaggagagaagatgtattcaaagaagagggaaggaaattgggagactgcaaagaagaacattaacaaaaattcaaaata

SEQ ID NO: 1615 - DNA, 601 bp, Human
cctggcaaacctcttaactcggagactcagttccatactgcagaacatttgccttttagcctttttagaaagacaggaaaaataactacaagttttatggactggctgagttgaaatataaatacaaattaaggtatataaatatatacttatataaatataaattatatagatttaaagtgtaaatttatatttatattttgtagaataaattaaatataaacataaattaaagtatgtaaatataaatttatataatacaaataaataagtttataaatataaattaaaatagtattgkaataacttttaatactagcccattccagtacatgattcaaatacattatcaactctgtgggctttccagggaatattcccagggaatgtagtaagagaacactcaagcatcatttcaaaaactattctttaggttgcctctgttaattagtgaagagttttaatgcttaaaatgtcagtcccaagttaggccaagacaagattcttaaagatgatgccaacccattcagacacagagccactagcgagccatgtcagacatgatctttggcttgtccaattatctctagttggcctgaat

SEQ ID NO: 1616 - DNA, 601 bp, Human
ctttctgcttgaggaagctagagttgattctttgttttctattccattgtttgcaaccaaagaactctaaattataaaaacaactactatggctaaattataaaaacaactactatggctaaatactactatggctttccgtggaatgaaatggttcttggaaaagtaaaggacttattaatattacatttgctatctttatagattcaaggaaaggcaaaagctattacttccaggagtttgtagactttgtcttaattctgtcaaaatgcataccccctctattccaggcactatacargacattttcaatgcattgtctcatttaattttaacaacaaccaactagaacataagctccaggagggcaggattttttttactccctggttcactactatattcctagaacattttcacacatgataggtgatcagtaaatgtttgctgaatgaataaataaccctgaggcaggcactattttacaaaaggagaaaaaagataatcatggtcctactgcaagtcagtggtagagctaagatttgaaaggcaggcatgtctgactacagggcccagtctcctaaccatcttgctaccattg

SEQ ID NO: 1617 - DNA, 601 bp, Human
aattatgcactaatgatagccactcagcaagtagcttagtcatttccctttagcctctgtagagagaatcccaatttggtcatttctccaacaaatgtttcttgggtgcatatcatgtgctagaaactgctacatgcaagatacagtggcctataaaacaggcatggcccctccctcatggaatttacctttgattaaaggtacacattgaatacatactggggagccaataacagaagccggactctcccttcatcaccgagaggctggcacagagcccaggggcaggctgttgaacacyttctccctggaatttgaatcttgaccagcatgcttgtgcagttttgttcccaaggacactttccgttttacagagctatccaggaagttcaaggtattggaatgtcaacaaattgccatttattgactatcaattaagtgcaagcattgaactatgtactttccttatattatttctacatatattatttgaaaacttaaaaaatggaaaggctaatgtttcctggcagagacacacaaatgatttctcaggaatagcaaatacatgtaattatagaaggtaatgtaacaggtctctcca

SEQ ID NO: 1618 - DNA, 601 bp, Human
taaaatacttatctttacttccaaatagatggtaaactggaacataattggcattcaaaaagcatttgtcaaatatatgaggattacttagctaactgaacgctctcttgggacaagcaaggacctactatgctcgatgcttctaaaaatgcctactcttgtgcattgtataatgtactccaaaaaataatttcaggtttatttaattccatattctgcatgcatttaatatatgcttaataagcaccgactatatttcagacactgagttaagtaatgatactgggttagtgacaaccayagcccagacccttaaatagcttctcatcccatgggagagacaggacaaataagaaacaggcagattgagaaatcctgggagaatgtaaagcttctacagggcccacatcagaggcacctaagctgtggtagggtgccaggtgttggtggtttgggagaagtgatgtaggaggggaagtctggattgttataaggaattaggctggcaaagagatgcaggaagggatgtgctacatcagaatgaaacaataaaatttaaacacagaaaaaccaaagtgtcaccagactcaacatatagtag

SEQ ID NO: 1619 - DNA, 601 bp, Human
tgtactaaactgtttggttcaaaggcaagattcacctttaaaattttttttactgctgtgtatttcctgaggttggagtgtgtcattcatttttatattccaagtatctaatacgatgcttggaatatggtagacaccgggtaaatcccagatggatgaatgagaagctataaagaaaaaaaggggaaggaagggaaagaaaggcctgtttccaatataaactaggttgaaatactttaccagcctaagtgatatcctcacccactgatatgatttggctgtgtctccatccaaatctcaycttgaattgtagctcctataattcccacgtgtgtaggaggaacccagtgggacataactgaatcgtgggggcgcactccccgatactgttctcatggtagtgagtaagtctcatgagatcgatggttttataaggggaaacccctttcacttggctctcattttctatcttgtctgctgccatgtaggatgtgcctttcacctcctgccacaattgtgaggcctccccagccatatggaactgtgagtccattaaacctctttttctttgtaaatcacccagtctcaggtatgtctttag

SEQ ID NO: 1620 - DNA, 601 bp, Human
gaaacataatttgagagaaggaataagaactatataaatgaagatggccttgtcccacaaatatgagtttttatactgaaaataaacactgtactaaactgtttggttcaaaggcaagattcacctttaaaattttttttactgctgtgtatttcctgaggttggagtgtgtcattcatttttatattccaagtatctaatacgatgcttggaatatggtagacaccgggtaaatcccagatggatgaatgagaagctataaagaaaaaaaggggaaggaagggaaagaaaggcctgtttycaatataaactaggttgaaatactttaccagcctaagtgatatcctcacccactgatatgatttggctgtgtctccatccaaatctcaccttgaattgtagctcctataattcccacgtgtgtaggaggaacccagtgggacataactgaatcgtgggggcgcactccccgatactgttctcatggtagtgagtaagtctcatgagatcgatggttttataaggggaaacccctttcacttggctctcattttctatcttgtctgctgccatgtaggatgtgcctttcacctcctgccac

SEQ ID NO: 1621 - DNA, 601 bp, Human
caaaattatttgttaatttgattctggagctgagagatttcctttcacaggttttcctttttatataagaaatttgtaaaagaatttttttaattaagcatttagcatttaggatactggttttctatattagaagaaggttttcattatagaaagcaaaatacaatcaaaatttttaaatacacaaaatttcatagttcgattaaaggaaagtacagaaaggggttagtttttagtggcaggcactccctagaacatcttttaaagggggaaaagtgagagacatgtaagatagaaacakggtacagaaaataaagcataaaacaacattaacttagggtcattatactttatgtgttctattacaatggtccaaaggactattacttgttaaagaaatgaaaataaagacttcctaagttacatctgctatgttacctcagatcaatgagacacattttgaggaggtactcaaatgtcctagatgtgtacaagaggaatctcaaatttggagatgggacaggtttccatcatatttgaacctgataagcacttaggcactgtgaattttcagtggtgataatgaggagggatttctgta

SEQ ID NO: 1622 - DNA, 601 bp, Human
caggatggtctgcatgaaataattccaatcaaaattatttgttaatttgattctggagctgagagatttcctttcacaggttttcctttttatataagaaatttgtaaaagaatttttttaattaagcatttagcatttaggatactggttttctatattagaagaaggttttcattatagaaagcaaaatacaatcaaaatttttaaatacacaaaatttcatagttcgattaaaggaaagtacagaaaggggttagtttttagtggcaggcactccctagaacatcttttaaagggggraaagtgagagacatgtaagatagaaacatggtacagaaaataaagcataaaacaacattaacttagggtcattatactttatgtgttctattacaatggtccaaaggactattacttgttaaagaaatgaaaataaagacttcctaagttacatctgctatgttacctcagatcaatgagacacattttgaggaggtactcaaatgtcctagatgtgtacaagaggaatctcaaatttggagatgggacaggtttccatcatatttgaacctgataagcacttaggcactgtgaattttc

SEQ ID NO: 1623 - DNA, 601 bp, Human
taaaaatccaccctcccccatttttctacctccacattttggtatcttcactataaaatagttttctccgtttttttttcttcatagaaatcctaaagcttaagatcctattcgagttctcttctcccatgaaatattggttaagcacaccaacataactcttttaaagtattatacagcatcatgccatgttttatacttaccatataaagcctagtttttatcttttcgtgagcacatttttatcagcctttagggaaatagatatgtacaagacacatgacccagacaggcatatgcrtgtgtgcgtgtttgcacatgtatttgtacaccaattatttcaacttccagctacatcatcactgccctaaaaaaaaactataatgcactttgtcttttgcaggttaacaggatggtctgcatgaaataattccaatcaaaattatttgttaatttgattctggagctgagagatttcctttcacaggttttcctttttatataagaaatttgtaaaagaatttttttaattaagcatttagcatttaggatactggttttctatattagaagaaggttttcattatagaaagcaaaatac

SEQ ID NO: 1624 - DNA, 601 bp, Human
tttctacttgtccccatcatgcagggcataaatattctgttccattacaattaatccccactaaggaggcagaccacaacattttgaattaaaatgtagaattatttcattctttctagctcaagtttcaaactagaggtcttcaggaggaaccagtccagacatacgtttcatttggtgagcatggttttgcctacaaaaggtttttaaacattattagattacttaacaacagttattgaaccgcaaattgtatctgaaatttctgcttttaaaaaataaatctgaagatctagagaarctgggatttgaggaggagctgatcactttacagagaggctgctctcctcagatttccactgtctccacccctacagccctgacatagaattttcatggcagtcttcattgtacttgctccccatcaaggccacatcactcattctctttcctgcctacctcccatgagcactggagtcactctcctctgattgtcgttttaaaaatccaccctcccccatttttctacctccacattttggtatcttcactataaaatagttttctccgtttttttttcttcatagaaatcctaaagctt

SEQ ID NO: 1625 - DNA, 601 bp, Human
acaaaataattaaaaattcctgccttcaaggagcttattctgttgggggaagagagatgatagacaaaataaattactataaacaaaataaacaactgtgagaaataaatgaaaggaaaaagcaataagaactctatttgtatttatgtaaagccaaaatagatttaaaaatcaggcttatttacaaaaacagggcacaaatattttttcttagaaaaggtttcatactgggataaaggttttcttctgactcttacagagtaatagatgcttgtaaagtagtgactctcaatgttggctytaaatttaatcacatatgcatttaaaaaaatatgcttgccccttccctacacccttgagcaattaagtcagtatctttggaggtgggagttagtagttttaacatcttcccaggtgagattctaatagaagccaggactaagaatcacacctgtaaaagattaaataataaaaactttgaggaaaggtgagaatatttgttatgatctaatgtgtaggctgaaggagaaggcttgcccatcagtgagaaccagctgtggcatactgagatgcccagaatccctcacatgtgccacagaac

SEQ ID NO: 1626 - DNA, 601 bp, Human
cttgctgttttctcttcctagaaggttcttctgccagagggccacatggattgcccctttgtcccctcatttactcaagtgtcaccttctcagtgcaacatttcccaactactctggacacattctacacattttccctatcttatttttccctttggcattcatctccctgactcaacatatgttttagtgatttatcttcttcatgaactatctaaaaggggaggtctgtgagacctatttgattattattgagatacttagtatataggagaggcttaactaaaatgagttagaatgstaactaaagagtctaatccatcctgataatataagaatatatggattttcattcttcttttgttgttgttgttgttattttctttgtaatcctcacctcctcctatcctcggacaatttgtcttcttaataatgtttagcttaggctatgattcaaaattatctcacattcatttcacatataccagctgacaggccaggcaagcaagtgatatattcttagtggggaagaaagaatatgaacagctacagctatagagggcctaattctgaaatgaactcctaggcagtgaatctatag

SEQ ID NO: 1627 - DNA, 601 bp, Human
attttattcccatgagagataagcacattatatgacaatctattttgccctgttggatgccaaatttgctggaatttgtgggccggtagaaataacataaattttaatttcactgtctgagtaactccccatgggcatacaggctacttgaaataccacgtgtgtaaatatgtctgtccatatcacacccacaagtttatatctcaagcacacatatttaaaacagaatctaatgcacatatatatctcaatgccttgagtgcattctctgatattcaattgtagttgactataaaaaaaatgtataatctgtacatacattgctcctctcagccactctaactgaggaaagcaacgatcaaaaaccagggctaattcctgtaaaaataaaataagaatcaagtggaaataaaatataaacaaaattgaagaattcacagacataattagacccatgggaatccatttaattccaattaatacacatattcctatttaaacaggcataaaacatatattcacatctgtacttagactccatccttattgatttgcttctatcacacattcatgagttaataaatatgtactgtacacgtga

SEQ ID NO: 1628 - DNA, 601 bp, Human
gtattttgaatacccacattcaaacaattgattttttttccctcttcgttatctttctcctctaaaatctctgcaatccactgtgggttttgtttttgcttcttttatacccaagtgtgggcactgacagtatatctgtgcccctttctcacacacccaaccaaaagtgggcggactcccacatgtaatgactgagaggttcctagctcctacctcactcaaaggaggagtccttaaaataacccaattactttttgtttgtcatatgaaatacagggctgagaataaggtatgggcactrgacggtggggaaaaagaaaagaaatctcaagcatatgtgtgcaataaaaaaatcaagacaataaataccaccttacatttcgtaacacattataaaatgctttttgtccactcatttcttacatatgccctgagagttagcttattcttattttattcccatgagagataagcacattatatgacaatctattttgccctgttggatgccaaatttgctggaatttgtgggccggtagaaataacataaattttaatttcactgtctgagtaactccccatgggcatacaggctacttga

SEQ ID NO: 1629 - DNA, 601 bp, Human
gctgaaatgatattccttattttctgcccaggatcataatctggtatccaaagatttcaataactcccttctttgattcccccacatacaaaaattaaattgaggttatttaactgttctgaatacaattatatttaaatgaaatacatgtatttaaaaaatcatctcaaagtcatgagatttacaccattataactatctccatattatctaataattttagaaaatacatcaaatacacatgcacacacagacacatatacacactttcagtaaattgggcatttttccaagtattccrtttttcaaaaaggcttatttcattgatgttcaaaaacagttcaagaaaaagagttaagaatatttaccaataaatggataattttgtttactatgatgtaaattttgtgtttggctttccagcaatactacaagccgttatttgctttcaatcacataatacaatggcgccttagctctatccctagtgtaaacaaactatgataattccaatcaagttaaaacgacaaagaacacttaaatcaaccagttttctccaatttctttaataagtctgggagaatgtataacaaatacaatg

SEQ ID NO: 1630 - DNA, 601 bp, Human
agactctgtctcaaaaaaaaaaaacaaccaaacctctagtttaggaggcaaatcctaatcagaaggggtaactgttaacttcaaaatggtgccacctacttccataaactgaccaattgtaaaaatccaaattgcacaagtcaataactgaagcttattgaataccctcaggccctcaggtagattcttcaatctaccttctttcaatatgcctttgaaaggaccctgtatatgtaattctaatattaaataggctgaaatgatattccttattttctgcccaggatcataatctggtatycaaagatttcaataactcccttctttgattcccccacatacaaaaattaaattgaggttatttaactgttctgaatacaattatatttaaatgaaatacatgtatttaaaaaatcatctcaaagtcatgagatttacaccattataactatctccatattatctaataattttagaaaatacatcaaatacacatgcacacacagacacatatacacactttcagtaaattgggcatttttccaagtattccatttttcaaaaaggcttatttcattgatgttcaaaaacagttcaagaa

SEQ ID NO: 1631 - DNA, 601 bp, Human
cattcccaccaacacactcatagaaagctaatcttcaatcattcacttaacaaacatttttgaacatctactctgtgccagggacatctgaagtgtgggagatacaaaaagaaacaagacaaaatctgtccctctaataacactactgtggaagggaagaacctgtaaacaattcattataaaatataatatttatttcagtactctgtaaaaaatgttcaaggacttccaaacatgtaccttgttaacaaggcagtgtgtgatattctatgcacgtggacaaacagtaccaacactgggyacatggcatagctaatcaatgattacttgctaaataattcattgatctgcatttattgccaacaatatcttctggaccattttcttttccttcttttagcacttcacattgtttgttcaatctgacctgcttccaaaatcttcttttgaaagttctgtatgctatgacattaacaatatgggctaaattatcccacacagattttattataaaatgcacctagctgctgacatctaatgaagctagcagtacccacacttcctttctctctagcactgaactccagttaattgacctgac

SEQ ID NO: 1632 - DNA, 601 bp, Human
ctaccttgtttttgattcattcccaccaacacactcatagaaagctaatcttcaatcattcacttaacaaacatttttgaacatctactctgtgccagggacatctgaagtgtgggagatacaaaaagaaacaagacaaaatctgtccctctaataacactactgtggaagggaagaacctgtaaacaattcattataaaatataatatttatttcagtactctgtaaaaaatgttcaaggacttccaaacatgtaccttgttaacaaggcagtgtgtgatattctatgcacgtggacaamcagtaccaacactgggcacatggcatagctaatcaatgattacttgctaaataattcattgatctgcatttattgccaacaatatcttctggaccattttcttttccttcttttagcacttcacattgtttgttcaatctgacctgcttccaaaatcttcttttgaaagttctgtatgctatgacattaacaatatgggctaaattatcccacacagattttattataaaatgcacctagctgctgacatctaatgaagctagcagtacccacacttcctttctctctagcactgaactc

SEQ ID NO: 1633 - DNA, 601 bp, Human; identical to SEQ ID NO: 714

SEQ ID NO: 1634 - DNA, 601 bp, Human; identical to SEQ ID NO: 715

SEQ ID NO: 1635 - DNA, 601 bp, Human; identical to SEQ ID NO: 716

SEQ ID NO: 1636 - DNA, 601 bp, Human; identical to SEQ ID NO: 717

SEQ ID NO: 1637 - DNA, 601 bp, Human
tgaccctgccagatttttttactgatgcagaaatgatggctactggtgagcctgtttatgagaaatgcaaataaacattccaatgtgtagaaaagtcagatgctttatatctgtgttcttgtatagacagaaaaatcatggagaagccagcagttaaacatggagaaagcctttccatgagaagggggctctagtgtccagccagaacatgtggctcagactccagagagataacaaattgacatttgggccaagccaaagagctggcgaggggagggggtgggtgcttccattgcacaaygttaagtgcaaatcttgactctgccttccattagctgtgtgatagcaggggagctgtgacctctcagaactggcactttctgctgtatatgggagataatattgacctcatcaggttgttggaggatgaaatcagatgaattatgcaaataactttgataacaatggctatcttaaccaaatgcctaacatataggcctggcacaccgtagctggttgttttgcttttttttttttttttttttttttttttgagccagagtctcgctctgtcgctcaggctggagtgcagtggcgcgat

SEQ ID NO: 1638 - DNA, 601 bp, Human
gagcctgtttatgagaaatgcaaataaacattccaatgtgtagaaaagtcagatgctttatatctgtgttcttgtatagacagaaaaatcatggagaagccagcagttaaacatggagaaagcctttccatgagaagggggctctagtgtccagccagaacatgtggctcagactccagagagataacaaattgacatttgggccaagccaaagagctggcgaggggagggggtgggtgcttccattgcacaatgttaagtgcaaatcttgactctgccttccattagctgtgtgatagcrggggagctgtgacctctcagaactggcactttctgctgtatatgggagataatattgacctcatcaggttgttggaggatgaaatcagatgaattatgcaaataactttgataacaatggctatcttaaccaaatgcctaacatataggcctggcacaccgtagctggttgttttgcttttttttttttttttttttttttttttgagccagagtctcgctctgtcgctcaggctggagtgcagtggcgcgatctcagctcactgcaagctctgccttccaggttcacgccattgtcctg

SEQ ID NO: 1639 - DNA, 601 bp, Human
ctcagcctcctgagtagctgggactacaggcacccaccaccacgcctggctaattttttgtgtttttagtagagaccgggtttcaccgtgttagccaggatggtctcaatctcctgacctggtgatctgcctgcctcagcctctcaaagtgctgggattacaggcgtgagccaccacgcccagccatggttgttttgctttaattaagaaagatttcagacagtatctgcctcagaagcaagcctctcttttcatggattgattcccttcttttatgtcagaacataaaagatgactgccmgtcatctgccattaccaaagagtactgaactccaagtcaggagtctaggattttgcagtgctggttctcccttctcagtcatctcatctgtaaggtggggataagtagctgctgtgctctgtactgcctgcttctaggggctgtgtggacaaagggaggtgtgctttatcctgatggaatagtatctgtcacttagaatccaatggatatgactgaagaatgaaaagacaaaacaaaacaaaaacactgttcaacaataacaattaaacagctgcctattattaagtgcctgctgtgtgg

SEQ ID NO: 1640 - DNA, 601 bp, Human
catctcatctgtaaggtggggataagtagctgctgtgctctgtactgcctgcttctaggggctgtgtggacaaagggaggtgtgctttatcctgatggaatagtatctgtcacttagaatccaatggatatgactgaagaatgaaaagacaaaacaaaacaaaaacactgttcaacaataacaattaaacagctgcctattattaagtgcctgctgtgtggcgggcctctagtaggcattttgtgtgtgtttgcacacatactgttcacaacaactctaagagatagatgtatcccatctyctacaagacgggtaaactgagactccaagagtcaaggggacatgacagagttaacagctagcaagtgacaaggctggaactgaataacattttgatgccaaggtccttgccctttctattaagttaaactgaagtttatgtgaacagtattaactcactgaagttgagtggtagataagaggagtgtttagcaggctggttctagacctctgcgtccatcttggttagaaagaaatagctccagggctcagccaggtgcagtggctcacacctgtaatcgtaacactttgggaggccgag

SEQ ID NO: 1641 - DNA, 601 bp, Human
aaacaaaaacactgttcaacaataacaattaaacagctgcctattattaagtgcctgctgtgtggcgggcctctagtaggcattttgtgtgtgtttgcacacatactgttcacaacaactctaagagatagatgtatcccatctcctacaagacgggtaaactgagactccaagagtcaaggggacatgacagagttaacagctagcaagtgacaaggctggaactgaataacattttgatgccaaggtccttgccctttctattaagttaaactgaagtttatgtgaacagtattaactyactgaagttgagtggtagataagaggagtgtttagcaggctggttctagacctctgcgtccatcttggttagaaagaaatagctccagggctcagccaggtgcagtggctcacacctgtaatcgtaacactttgggaggccgaggtgattggatcatttgaggtcaggagtttgagaccagcctgaccaacgtcgtgaaaccctgtctctaccaaaaatacaaaattagctgggtgtggtggcacgtgcatgtaatcccagctacttgggaggctgaggcagcagaatcacttgaatctg

SEQ ID NO: 1642 - DNA, 601 bp, Human
tgtgtttgcacacatactgttcacaacaactctaagagatagatgtatcccatctcctacaagacgggtaaactgagactccaagagtcaaggggacatgacagagttaacagctagcaagtgacaaggctggaactgaataacattttgatgccaaggtccttgccctttctattaagttaaactgaagtttatgtgaacagtattaactcactgaagttgagtggtagataagaggagtgtttagcaggctggttctagacctctgcgtccatcttggttagaaagaaatagctccagrgctcagccaggtgcagtggctcacacctgtaatcgtaacactttgggaggccgaggtgattggatcatttgaggtcaggagtttgagaccagcctgaccaacgtcgtgaaaccctgtctctaccaaaaatacaaaattagctgggtgtggtggcacgtgcatgtaatcccagctacttgggaggctgaggcagcagaatcacttgaatctgggaggcagagattgcagtgaaccgagagatcgcactgttgcactccagcctgggtaacaaaagcaacactctgtctcaaaaaaaaaaaa

SEQ ID NO: 1643 - DNA, 601 bp, Human
gttaacagctagcaagtgacaaggctggaactgaataacattttgatgccaaggtccttgccctttctattaagttaaactgaagtttatgtgaacagtattaactcactgaagttgagtggtagataagaggagtgtttagcaggctggttctagacctctgcgtccatcttggttagaaagaaatagctccagggctcagccaggtgcagtggctcacacctgtaatcgtaacactttgggaggccgaggtgattggatcatttgaggtcaggagtttgagaccagcctgaccaacgtmgtgaaaccctgtctctaccaaaaatacaaaattagctgggtgtggtggcacgtgcatgtaatcccagctacttgggaggctgaggcagcagaatcacttgaatctgggaggcagagattgcagtgaaccgagagatcgcactgttgcactccagcctgggtaacaaaagcaacactctgtctcaaaaaaaaaaaaaaaaaaataggaaacaaaagaaaaaagaaataccctccagggctcaaaacaaagactcaagctttaaaacctcatcatttacactgtctttcctccagcatctca

SEQ ID NO: 1644 - DNA, 601 bp, Human
tcaggagtttgagaccagcctgaccaacgtcgtgaaaccctgtctctaccaaaaatacaaaattagctgggtgtggtggcacgtgcatgtaatcccagctacttgggaggctgaggcagcagaatcacttgaatctgggaggcagagattgcagtgaaccgagagatcgcactgttgcactccagcctgggtaacaaaagcaacactctgtctcaaaaaaaaaaaaaaaaaaataggaaacaaaagaaaaaagaaataccctccagggctcaaaacaaagactcaagctttaaaacctcaycatttacactgtctttcctccagcatctcatgaatatcagtggcttatataaagtaatcattaggctattaaaaaaatttattctcatgtctcaaaactcttttggtaaaatcttcacaagttttgttttgttttgctttttaaggaaagccacatttagcaacagtattaggtagactttcccatctgaaagattaagataaatgatctctttcttttctttttaggccactggagaatgcacggcaaccgtggggaagaggagcagtacgaaattctccgtggctacccagacctgcc

SEQ ID NO: 1645 - DNA, 601 bp, Human
atctgaaagattaagataaatgatctctttcttttctttttaggccactggagaatgcacggcaaccgtggggaagaggagcagtacgaaattctccgtggctacccagacctgccagattactccaggtggctggtttatcctctggcactgccctggtgggaaattaaccatttctgtgagccaggaacacaatcttgaccaggctctgcttgctcccagagggtggcagtagtaaagccatttgcagagttagggagcattgggtggagcggcagagcccggaggttgagccaggctygtgaccatcatccccttaggactatcccaactcttcccgtgtgctgcattgtacccagtgtgtgcaagggctcaacagaaggaccagaagacataagacctgccctccattgcaggcagcatcccagattgaggagcgcataggctttgagggcagacctggcctggaatctttcagagctccttgccttcttgcctctccttttccttgtctagaaaagggaggtaagagtacttcccacttcacaggactgttgtgaggctgaaatgagatgatatgcctggaggtacaatcataata

SEQ ID NO: 1646 - DNA, 601 bp, Human
gagcgcataggctttgagggcagacctggcctggaatctttcagagctccttgccttcttgcctctccttttccttgtctagaaaagggaggtaagagtacttcccacttcacaggactgttgtgaggctgaaatgagatgatatgcctggaggtacaatcataataacatactaacatattaatcataataacatattagcaacaatcaggataaaagtaatagctaagatatattgagtccttatgtcccagccatgactcaaagcaccttacatgtattatcttctttttctttttttcttttactgatacataatattttacatatttatgaggtacatgtgagtgttttttacatgcattgaacgtgtaatgattaagtcagggtatttggggtatccatcacctggaatagttatcatttctatgaattggtaatatttcaagtcctctcttttagctactttgaaatatacaatatattgttgctaactatagacactctagtctgctatgtaacattagaacgtatttcttctatctaactataattcagtacctattcaccaacctcttcatttcccccttctacccgctta

SEQ ID NO: 1647 - DNA, 601 bp, Human
tttccttgtctagaaaagggaggtaagagtacttcccacttcacaggactgttgtgaggctgaaatgagatgatatgcctggaggtacaatcataataacatactaacatattaatcataataacatattagcaacaatcaggataaaagtaatagctaagatatattgagtccttatgtcccagccatgactcaaagcaccttacatgtattatcttctttttctttttttcttttactgatacataatattttacatatttatgaggtacatgtgagtgttttttacatgcattgaacrtgtaatgattaagtcagggtatttggggtatccatcacctggaatagttatcatttctatgaattggtaatatttcaagtcctctcttttagctactttgaaatatacaatatattgttgctaactatagacactctagtctgctatgtaacattagaacgtatttcttctatctaactataattcagtacctattcaccaacctcttcatttcccccttctacccgcttaccccgctcagcctctggtatctgtcattctcttcccttctctatctccatgtgatggttttagcttcca

SEQ ID NO: 1648 - DNA, 601 bp, Human
atcataataacatactaacatattaatcataataacatattagcaacaatcaggataaaagtaatagctaagatatattgagtccttatgtcccagccatgactcaaagcaccttacatgtattatcttctttttctttttttcttttactgatacataatattttacatatttatgaggtacatgtgagtgttttttacatgcattgaacgtgtaatgattaagtcagggtatttggggtatccatcacctggaatagttatcatttctatgaattggtaatatttcaagtcctctcttytagctactttgaaatatacaatatattgttgctaactatagacactctagtctgctatgtaacattagaacgtatttcttctatctaactataattcagtacctattcaccaacctcttcatttcccccttctacccgcttaccccgctcagcctctggtatctgtcattctcttcccttctctatctccatgtgatggttttagcttccacatgtgagtgagaacaatgtgaagtttgtctttctgtgcttgagttgtttcacttaacgacctctagttctgtccatgtggctttaaat

SEQ ID NO: 1649 - DNA, 601 bp, Human
aggtacatgtgagtgttttttacatgcattgaacgtgtaatgattaagtcagggtatttggggtatccatcacctggaatagttatcatttctatgaattggtaatatttcaagtcctctcttttagctactttgaaatatacaatatattgttgctaactatagacactctagtctgctatgtaacattagaacgtatttcttctatctaactataattcagtacctattcaccaacctcttcatttcccccttctacccgcttaccccgctcagcctctggtatctgtcattctcttcycttctctatctccatgtgatggttttagcttccacatgtgagtgagaacaatgtgaagtttgtctttctgtgcttgagttgtttcacttaacgacctctagttctgtccatgtggctttaaatgatatgatttcaattctttgtttacggccaaatactatttcattgtgagtatataccacaatttctttctttttttttttcattttgagacagagtctcgcactgtcgcccaggctggggtgcagtggcacgatctaggctcactgcaacctcccgggttcaagcaattctccagcc

SEQ ID NO: 1650 - DNA, 601 bp, Human
aacctcccgggttcaagcaattctccagcctcagcctcagcctcctgaatagctgggattatgggcatcgccaccacgcccggataatttttgtgtttttagtagagatggggtttcaccatgttggccaggctggtctcgaactcctgacctcaggtgatccacccgcctcggcctcccaaagtgctgggattacaggtgtgagccactgtgcctggtcccccacattttctttattcattcaccttttgatggacatttaagttgatttcatatctttgctattgtgaatactgctgcracaaacctgggagtggaagtacccctttgataggctgatttactttcctctgggtagatgcccagtagctggactactggatatatggtatttggtgttttcattttttgaggaatctccgcactattttccatagtggttgcactaatttacattcttaccaacagtgcattagagttctcttttctccatttcctcctggctgtgtttaccgcttacatggcaggcagcgagagctctgtggtgaagaagtccaggctcccagggggtccctccaggtgtgccactcactctgcagct

SEQ ID NO: 1651 - DNA, 601 bp, Human
tatttttagtagagacgaggtttcaccatggtggccaagcgggtggtctcaaactcccaacctcaagtcatcctcccacctcggcctcgcaaagtgctgggattacaggcctgagccactgcactcagctacaaatcttcttaatgattcagtacacccagacttttcttcttttttttttttttttttttgttttttgaggaagagtcttgttctgttgcccaggctggaggctggagtgcagtggtgccatcttggttcactgcaacttccacctcccaagtttaagagatctcctgcytcagtatcccaagtaactgggattacaggcacccaccaccacgcccggctaatttttgtatttttggtagagacaaggtttccccatgtcggccaggctggtcttaaattcctgacctcaggtgttcctcccgtctcggcctcccaaagtgctgggattacaggcatgagccaccacgcccgcccctcccagacttttctgatagttgactgggtctcttgtatttcagcctcttattatgagtgattccctttggttagtaacattctctgcatttaataaaccttacaacttgctttc

SEQ ID NO: 1652 - DNA, 601 bp, Human
gctgggattacaggcatgagccaccacgcccgcccctcccagacttttctgatagttgactgggtctcttgtatttcagcctcttattatgagtgattccctttggttagtaacattctctgcatttaataaaccttacaacttgctttcatgcgagcatgctttactcaattatgtccgtatagtgctatcagggtgggagaggcccagaataaagtagaagaaatcttactacttggtaacctgggagcctgaggacccaacagtaaagaccactcccctctaaagttttctttatccrtctagaagggcattattattttatgaaattcagtaaacatttctctctgcagcctggcagaggaaatattgttaggattcacttaaggaaatccatgttccaaaactggctgaaaaatagaaaaatatatatattgcttgtcattttcagatggctagcggtgtatgtgtgtgtgtgtgtgtgtgtgtttgtgtgagagatatgagactcttaaggtgctcaatgtttattcagcatttttttgcctagtaataataatattttatatttcttgggcacttattatattgccacactgtt

SEQ ID NO: 1653 - DNA, 601 bp, Human
aagtaggcaaaaatttaatgataaagttcttagcattttgtttacattttgtggtaactatcaagctgggtgggaagactgtcacgaaaagtttagatgacattcagcaattcatattcacatttacttgggaagactaaagctcacgtcactggtcaagctgccttacctaactggccaaagaatctgcacagctagcaataagtatttttttataactttattttattttatttattttttgagacaggatctcaatctgttccccaggctggagcacagtggtgtgatctcatctcaytgcagcctccacctcgcatgttcaagctattctcctgcctcagcctcccaagtagctaggactacaggcgccaaccaccacgcatggctaatttttgtatttatagtagagacagggttttaccgtgttagccagagtggtctcgaactcctgacctcaggtgatccgcccaccttggcctcctaaagtgctggtattacaggcatgagccaccgtgcctggccagcaataagtatttacagagcataaccagggactacgaatagataaaatgcttgaacggtcaactgtatctttgtt

SEQ ID NO: 1654 - DNA, 601 bp, Human
tgctttttcttttttgagaagaggtcttgctctgtcaccttggctggagtgcagtggtgcgatctcggctcactgcaacctctgcctcccaggtttaagcaattctcatgcctcagcctccctgagtagctgggattacaggcgcccgctgcaacgccaggctaatttttgtattttgggtacagatgggggttttgccacgttggccaggctgttttcgaattcttgatctcaggtgatccacccaccttggccttccaaagtgctggtattacaggtgtaagccactgcatccggccgytttttctgattctttatattttttggaagtttttgatatttcccgagttttctaattgagcatgcatttattttataattggagaaaaaagtaaaaaggacactatcaagagagtaaaaatacaacccacagaatgagagaaaatatttgcaaatcatgtatctgataagagtttaacatgcagaatatataaagaacctctttttgttcataaaataacaagtattagaaagggcatggagaaattagaacttttgtacattgctggtaggactgtaaaatgctgcagccattatagaa

SEQ ID NO: 1655 - DNA, 601 bp, Human
ttctgattctttatattttttggaagtttttgatatttcccgagttttctaattgagcatgcatttattttataattggagaaaaaagtaaaaaggacactatcaagagagtaaaaatacaacccacagaatgagagaaaatatttgcaaatcatgtatctgataagagtttaacatgcagaatatataaagaacctctttttgttcataaaataacaagtattagaaagggcatggagaaattagaacttttgtacattgctggtaggactgtaaaatgctgcagccattatagaaaatmatttggcaatttctgaaaaacttaactatagaattactatgtgacccagaagttgcactcttaggtatatgcccaaaagaactggaaatgcatattcaaacacgtgtttatacatgaatttctatagcagcaaaattcataatagccagaaagtcaaaacaacccaagtgtctatcaataggtgaatggataaacaaaatgtgctattatatatacacaatgaaacactgttcaccctttaaaaagaatgaaattctgatacatgctacaatgtggatgaagcttgaaaatattatgtta

SEQ ID NO: 1656 - DNA, 601 bp, Human
aaaattcataatagccagaaagtcaaaacaacccaagtgtctatcaataggtgaatggataaacaaaatgtgctattatatatacacaatgaaacactgttcaccctttaaaaagaatgaaattctgatacatgctacaatgtggatgaagcttgaaaatattatgttaagtgaaataagccagacacacacaaaaaatattgtatgattccacttatataaaacacctagaataggcaaattcagtcagagactattggagttgctagaaatgtaatgtaggcttttcttttttttttttgagactgagttttggtcttgttgcccaggctggagtgcaatagcgcaatcttggctcactgcaacctccgcctcccgggttcaagtgattctcctgcctcagcttcccgagtagctgggattacaggcatgtgccaccacggccggctagttttgtatttttagtagagatgaggtttctccatgttggtcaggctggtctcgaactcccaacctcaggtgatccgcctgcctcagcctcccaaagtgacttatcacacagcacctggctatgtttgtttattattcttttttcccctca

SEQ ID NO: 1657 - DNA, 601 bp, Human
cagaaagtcaaaacaacccaagtgtctatcaataggtgaatggataaacaaaatgtgctattatatatacacaatgaaacactgttcaccctttaaaaagaatgaaattctgatacatgctacaatgtggatgaagcttgaaaatattatgttaagtgaaataagccagacacacacaaaaaatattgtatgattccacttatataaaacacctagaataggcaaattcagtcagagactattggagttgctagaaatgtaatgtaggcttttcttttttttttttgagactgagttttgstcttgttgcccaggctggagtgcaatagcgcaatcttggctcactgcaacctccgcctcccgggttcaagtgattctcctgcctcagcttcccgagtagctgggattacaggcatgtgccaccacggccggctagttttgtatttttagtagagatgaggtttctccatgttggtcaggctggtctcgaactcccaacctcaggtgatccgcctgcctcagcctcccaaagtgacttatcacacagcacctggctatgtttgtttattattcttttttcccctcacttctggagacctag

SEQ ID NO: 1658 - DNA, 601 bp, Human
taggtgaatggataaacaaaatgtgctattatatatacacaatgaaacactgttcaccctttaaaaagaatgaaattctgatacatgctacaatgtggatgaagcttgaaaatattatgttaagtgaaataagccagacacacacaaaaaatattgtatgattccacttatataaaacacctagaataggcaaattcagtcagagactattggagttgctagaaatgtaatgtaggcttttcttttttttttttgagactgagttttggtcttgttgcccaggctggagtgcaatagcgcratcttggctcactgcaacctccgcctcccgggttcaagtgattctcctgcctcagcttcccgagtagctgggattacaggcatgtgccaccacggccggctagttttgtatttttagtagagatgaggtttctccatgttggtcaggctggtctcgaactcccaacctcaggtgatccgcctgcctcagcctcccaaagtgacttatcacacagcacctggctatgtttgtttattattcttttttcccctcacttctggagacctaggcataggtctttctatttgtttgttctatttg

SEQ ID NO: 1659 - DNA, 601 bp, Human
aggtttctccatgttggtcaggctggtctcgaactcccaacctcaggtgatccgcctgcctcagcctcccaaagtgacttatcacacagcacctggctatgtttgtttattattcttttttcccctcacttctggagacctaggcataggtctttctatttgtttgttctatttgtttgttctatttgtttttctccctctgtttttaaattatgaaatcatgtcgagtcaaaaattaacttagaatgctgttctaataacattatatggaattctcatttttgttattttgtttttttttccttatccaagaaagaccctaactttattggcaagcatgtttatatttccaagtatattgtttttgtttgtttaaacatgttatgaatttttagagattattttttctttttggtgctgaggtgaaagaacataccctgtattgtttctgctttgtaaaatgtattggatctttttgtgacctggtgtaaaaacaattaaaaatatttgtatgatactggccgggcacggtagctcatgcctgtaatcccagcattttggtgggtggatcacttgagatcaggagttcgagaccagcctg

SEQ ID NO: 1660 - DNA, 601 bp, Human
ttttttttccttatccaagaaagaccctaactttattggcaagcatgtttatatttccaagtatattgtttttgtttgtttaaacatgttatgaatttttagagattattttttctttttggtgctgaggtgaaagaacataccctgtattgtttctgctttgtaaaatgtattggatctttttgtgacctggtgtaaaaacaattaaaaatatttgtatgatactggccgggcacggtagctcatgcctgtaatcccagcattttggtgggtggatcacttgagatcaggagttcgagaycagcctggccaacatggcaaaacctcatctctactaaaaatacaaaaaaattagccgggtgtggtggcagacgcctgtaatcccagacacttgggaggctgaggcaggagaatcacttgaatccaggaggcagaggttgcagtgagctgagattgcgccactgcactccagccttggtgacaaagagagactccatcacaaaaaaaaaaaaaaatatatatatatatatatacacacatatatatatacacatatatatatacacacacacaaatacatacaaattagtatgatacttat

SEQ ID NO: 1661 - DNA, 601 bp, Human
tgtatgatactggccgggcacggtagctcatgcctgtaatcccagcattttggtgggtggatcacttgagatcaggagttcgagaccagcctggccaacatggcaaaacctcatctctactaaaaatacaaaaaaattagccgggtgtggtggcagacgcctgtaatcccagacacttgggaggctgaggcaggagaatcacttgaatccaggaggcagaggttgcagtgagctgagattgcgccactgcactccagccttggtgacaaagagagactccatcacaaaaaaaaaaaaaaawatatatatatatatatacacacatatatatatacacatatatatatacacacacacaaatacatacaaattagtatgatacttataaagtatcatttaaaatcatatgtagcatatgaaaataccatttaaataaatctttaatatgttattcaaatcttctatgttcttgtttattttttattcacttgccctgtcttagatttgtaattgcatactaaattttcccaccatattatttctatccatttctattcacgtgtaattttttctactttaggtattttgattccatgccttc

SEQ ID NO: 1662 - DNA, 601 bp, Human
ttttattcacttgccctgtcttagatttgtaattgcatactaaattttcccaccatattatttctatccatttctattcacgtgtaattttttctactttaggtattttgattccatgccttctggtctatgcttttgaaaaataaaatgatcatttttactacctttaggaatgagtgttttgttctcgtgaattttactttgtccaatattactaatactgtagttcctgctacgtttatatttgtctcacgtagctttgttcatctgttatttttaagctttatacattgtttttatyataagatgattcttgaaactgtaatacattgatttggtgttttaacagtgtgaaagtcttaccttatttttttagaaatttacctttttacttacatggctgttatttctgtactagatcttcctgctttccacgtgctcatgtatatgcatgtatttgttgatgctattgatactattaccttagtatctcttttgcagtaaggctatgttttgcttctttcttttttttctatgcaatgatttggaaagtacacgtcctattcttcaattttactagttgtttacttttaagactcta

SEQ ID NO: 1663 - DNA, 601 bp, Human
tttgaaaaataaaatgatcatttttactacctttaggaatgagtgttttgttctcgtgaattttactttgtccaatattactaatactgtagttcctgctacgtttatatttgtctcacgtagctttgttcatctgttatttttaagctttatacattgtttttattataagatgattcttgaaactgtaatacattgatttggtgttttaacagtgtgaaagtcttaccttatttttttagaaatttacctttttacttacatggctgttatttctgtactagatcttcctgctttccaygtgctcatgtatatgcatgtatttgttgatgctattgatactattaccttagtatctcttttgcagtaaggctatgttttgcttctttcttttttttctatgcaatgatttggaaagtacacgtcctattcttcaattttactagttgtttacttttaagactctaaaaaatgtttttaactgagcacttatatgctttttaaaaaccaggataccggtgaatgtacagataatgcatacatcgatattcagctacgaattgcttccttctcacagaactgtgacatttatccaggtaag

SEQ ID NO: 1664 - DNA, 601 bp, Human
gtaaattaagtgccaatctccctgtatgcttcatcccggacaagtattttacaacattctctctgttttctatatgtaaaggactgaggtgaggatcaaataagttaatatatgtcaaatcactttttcaaactctaaaatgctatataaatacaatagcagctgggcgcggtggctcacacctgcaataccagcactttgggaggccaaggcgggtggatcacaaggtcaagagatcaagaccatcctggccaacatggtgaaaccctgtctctactaaaaatacaaaaattagccgggygtggtggtgcacacctgtagtcccagctactccagaggctgaggcaggagaatcgcttgaacctgggaggcagaggttgcagtgagccgagattgcgccactgcactccagcctggcaacagagcgagactctgtctaaataaataaataaataaataaataaatacaatagcaaccatgatataattaataaaattcagggctagggccaggaagacttacgctatgtctttctggactcatctctcattataacatcacataatgtcttgggctcagccatatcagtcaatccatcat

SEQ ID NO: 1665 - DNA, 601 bp, Human
gaggcaggagaatcgcttgaacctgggaggcagaggttgcagtgagccgagattgcgccactgcactccagcctggcaacagagcgagactctgtctaaataaataaataaataaataaataaatacaatagcaaccatgatataattaataaaattcagggctagggccaggaagacttacgctatgtctttctggactcatctctcattataacatcacataatgtcttgggctcagccatatcagtcaatccatcattgccaaggctccacgctttcttgcctccatgtctttcaccyactgttctctctgcctgggatcccgctctcctgcaaatgtaccctctggggattcatctctcctttcatgccctatcaatagaagactgacaggagtgtcttctgggagtcaggagactcagttccaccatagcatctgccgctcacatcccagatcactctgggtggtcattcaaacgttctaagcctttgtggccccgtctgtaaaatgagtgactgtattagaagagcctacattttgccgggcagagtgcctcatgcctataatcccagcactttgggaggctgaggcaggcagat

SEQ ID NO: 1666 - DNA, 601 bp, Human
ggggattcatctctcctttcatgccctatcaatagaagactgacaggagtgtcttctgggagtcaggagactcagttccaccatagcatctgccgctcacatcccagatcactctgggtggtcattcaaacgttctaagcctttgtggccccgtctgtaaaatgagtgactgtattagaagagcctacattttgccgggcagagtgcctcatgcctataatcccagcactttgggaggctgaggcaggcagatcacctgaggtcaggagttcgagaccagcctgaccaacatagagaaacytcatctctactaaaaatacaaaactagccaggtatggtggtacatgcctgtaatcccagctactcggaaggctgaggcaggagaatcacttgaacccgggaggcggaggttgcaatgagccgagaccgtgtcattgcactccagcctgggcaacaagagcaaaactccttctcaaaaaaagagaagagcctacatgtctagcaactccaatagtctctgactgatgtcattatggacagacccctattttagagactaaaaattggcttccctaaatacaagctaaataaaaataatcaa

SEQ ID NO: 1667 - DNA, 601 bp, Human
taaaatgagtgactgtattagaagagcctacattttgccgggcagagtgcctcatgcctataatcccagcactttgggaggctgaggcaggcagatcacctgaggtcaggagttcgagaccagcctgaccaacatagagaaacctcatctctactaaaaatacaaaactagccaggtatggtggtacatgcctgtaatcccagctactcggaaggctgaggcaggagaatcacttgaacccgggaggcggaggttgcaatgagccgagaccgtgtcattgcactccagcctgggcaacaaragcaaaactccttctcaaaaaaagagaagagcctacatgtctagcaactccaatagtctctgactgatgtcattatggacagacccctattttagagactaaaaattggcttccctaaatacaagctaaataaaaataatcaaaatagagccaaattgttacagcaagccaacataatcctcataatctggtgaaaaaattctcactaaaaagttcatacttttggctcagaattgaatttctaggaatctaaagtaggagtctttatatacaatgatattcactgcagttttaagtata

SEQ ID NO: 1668 - DNA, 601 bp, Human
acattctagtatgcatatgtgtctacattaaggatgtcagggggacacaaagaggtaacccatcagatagctgccaagtcaatctgaatattgcaagaatttcaaacttactttagagagataaatctttactaatttttgcatttaaagagagcaatttggttgcttggacatagtcacccaaggcagccttgatggaagcagccaatttactggaaatcaattaaacatatgatgaatttgctaaaagctagtctccaaaatgaccaatttgccaaattgctaaatatttatagttttmatcttgccttgggtttgcacatttagtcctgtttggatgcatgttgattccacgttgggttcatatttcagatatgaaacacttcctgaatcttccattttcacacattagtgattacagtttcatataagttttattttgccctaccaccactgctgctgtccccaaggctgttgatgctcctgtctgcctctgctgagatgaataaacttccaagatctgtgtgtgcacatgcagaaatttttcctttgacaaagtcctaggaatgtcaaataatatgtagatatataagacttgatg

SEQ ID NO: 1669 - DNA, 601 bp, Human
tattgtgatttttcagaagcagttttcatttttctctagtcaagttttagtattttccccttccttcagatttctttcctctgcttttcacctaagaaaggccttcctcatcctgggttttggtgaatatttatttatttgtttagttgttttttgtttgtttgtttttgttttgttttgtttcccgaaacagagtctcactctgtcacccaggcttgagtgtagtggcgtgatcttggctcactgtaacctctgccacccaggttcaagcgattctcctgcctcagcctcccaagtagcygggattagagatgcttgcaaccatgtccggctaatttttagtatttttaatagagacagggattcattatatgttagccaggacggtctcgaacccctgacctcaggtgatctgcccgcctcaggcccccaaagtgctggaattacaggcaggagccactattcccggccaacacatttaaatactatgatttaatactaaataatttggttgagaaattgggccacaaaatatttaatggaagatagtgttgagtagtgattaaaactgttgctagagattaaaataatttttttttct

SEQ ID NO: 1670 - DNA, 601 bp, Human
aaaacataggctcagaagctaccctagagattagctagttcaaccatccagatgaagcaaaaacactccagcttattttacagttttttttgttgttgtttggctgggtttttttgttttttttttgttgttgttgttgtttgttttttgttttttttgacagagtcactgtcgcctaggctggagtgcagtggcgccatctcagctcactgcaacctccacgtcctgggttcaagcaattctcctgcctcagcctcctgagtagctgggattacaggcatgtgccaccatgcccagctartttttgtatttttagtagagatggggtttcagcatgttggccaggctggtctcaaactcctgacctcaagtgatctgctcgccttggtctcccaaagtgctgagattacaggtgtgagccaccatgcctggctattttatggtattattaacaacaataattaatgtccacaaattttaagatcaatcaaaagacaaaaaaaattattcatcctttctggaatgttaatatagcatttaaaatctggcaaacacctcccccattgtaaactaagatagcattgccagatctcagtgtttt

SEQ ID NO: 1671 - DNA, 601 bp, Human
atgatcttgaacaccaagggggccatgtccttgaccatggacataagcataagcatggtcatggccacggaaaacataaaaataaaggcaaaaagaatggaaagcacaatggttggaaaacagagcatttggcaagctcttctgaagacagtactacaccttctgcacagacacaagagaagacagaagggccaacacccatcccttccctagccaagccaggtgtaacagttaccttttctgactttcaggactctgatctcattgcaactatgatgcctcctatatcaccagctcccayacagagtgatgacgattggatccctgatatccagatagacccaaatggcctttcatttaacccaatatcagattttccagacacgacctccccaaaatgtcctggacgcccctggaagtcagttagtgaaattaatccaaccacacaaatgaaagaatcttattatttcgatctcactgatggcctttcttaatttaagtggctatgggtatttctttcatactttattaaagtatcaatatccctctctccattgtccagatgaaaatatcctgatataatgcaccaaaaaccatgcag

SEQ ID NO: 1672 - DNA, 601 bp, Human
aggctggagaattgcttgaacccgggaggcggaggttgcagtgagccgagatcgtgccactgcgctccagcctgggcatcagagcaagattctgtctcagaaaaaaagaaaaaaaaagaaataataagaaaaacttccagatttcaaagtaacaagaaagaagacaggttggccaaagggaggaaaggggggacataaattaattgactttctattcccaaaatgggctagttatatcaaataaatactcccactgccctttctgagtgagagtgtttctcataagtcaaaaatttctgtytactcattaactactctttgcaacaggctttcatatagaagtattctgtttatttttgctgagcctagattgagtaattcttagtttacagaagctccgagcttaatgataaggatgaaaagcagagggagcaatatagaagcaggcttgctaataaaactttttaaataattgacaagggaatattatggaatgtgatgcaaagtttgttccgaaattttatgaggaaattactctctagtctcactttatagtctttttgctatgactttgaagaccattgatttttgagaagcagaa

SEQ ID NO: 1673 - DNA, 601 bp, Human
ttcccaaaatgggctagttatatcaaataaatactcccactgccctttctgagtgagagtgtttctcataagtcaaaaatttctgtttactcattaactactctttgcaacaggctttcatatagaagtattctgtttatttttgctgagcctagattgagtaattcttagtttacagaagctccgagcttaatgataaggatgaaaagcagagggagcaatatagaagcaggcttgctaataaaactttttaaataattgacaagggaatattatggaatgtgatgcaaagtttgttccraaattttatgaggaaattactctctagtctcactttatagtctttttgctatgactttgaagaccattgatttttgagaagcagaataataggattgcctttcattgccctatagtgcaaagaaggtatatgctttataaccaatgttgtacttttgcctagaaaaacaagatatggctttaaatagctacaatcatctttggatgtatatgtcactgctgcttcaagttattggatgcatttgaacctctgagtttgtctttcattttaaatattgtctgttcttttaaataaacaacc

SEQ ID NO: 1674 - DNA, 601 bp, Human
tcattaactactctttgcaacaggctttcatatagaagtattctgtttatttttgctgagcctagattgagtaattcttagtttacagaagctccgagcttaatgataaggatgaaaagcagagggagcaatatagaagcaggcttgctaataaaactttttaaataattgacaagggaatattatggaatgtgatgcaaagtttgttccgaaattttatgaggaaattactctctagtctcactttatagtctttttgctatgactttgaagaccattgatttttgagaagcagaataayaggattgcctttcattgccctatagtgcaaagaaggtatatgctttataaccaatgttgtacttttgcctagaaaaacaagatatggctttaaatagctacaatcatctttggatgtatatgtcactgctgcttcaagttattggatgcatttgaacctctgagtttgtctttcattttaaatattgtctgttcttttaaataaacaaccacagatgtcaggaaaaagtcttaccttgtcaactggttgctccactttttaaaaatgattgaatgataacatcatattaactgcgtttta

SEQ ID NO: 1675 - DNA, 601 bp, Human
aagtattctgtttatttttgctgagcctagattgagtaattcttagtttacagaagctccgagcttaatgataaggatgaaaagcagagggagcaatatagaagcaggcttgctaataaaactttttaaataattgacaagggaatattatggaatgtgatgcaaagtttgttccgaaattttatgaggaaattactctctagtctcactttatagtctttttgctatgactttgaagaccattgatttttgagaagcagaataataggattgcctttcattgccctatagtgcaaagaargtatatgctttataaccaatgttgtacttttgcctagaaaaacaagatatggctttaaatagctacaatcatctttggatgtatatgtcactgctgcttcaagttattggatgcatttgaacctctgagtttgtctttcattttaaatattgtctgttcttttaaataaacaaccacagatgtcaggaaaaagtcttaccttgtcaactggttgctccactttttaaaaatgattgaatgataacatcatattaactgcgttttactatacttacagagtcacctaaggtcctgcgagta

SEQ ID NO: 1676 - DNA, 601 bp, Human; identical to SEQ ID NO: 1637

SEQ ID NO: 1677 - DNA, 601 bp, Human; identical to SEQ ID NO: 1638

SEQ ID NO: 1678 - DNA, 601 bp, Human; identical to SEQ ID NO: 1639

SEQ ID NO: 1679 - DNA, 601 bp, Human; identical to SEQ ID NO: 1640

SEQ ID NO: 1680 - DNA, 601 bp, Human; identical to SEQ ID NO: 1641

SEQ ID NO: 1681 - DNA, 601 bp, Human; identical to SEQ ID NO: 1642

SEQ ID NO: 1682 - DNA, 601 bp, Human; identical to SEQ ID NO: 1643

SEQ ID NO: 1683 - DNA, 601 bp, Human; identical to SEQ ID NO: 1644

SEQ ID NO: 1684 - DNA, 601 bp, Human; identical to SEQ ID NO: 1645

SEQ ID NO: 1685 - DNA, 601 bp, Human; identical to SEQ ID NO: 1646

SEQ ID NO: 1686 - DNA, 601 bp, Human; identical to SEQ ID NO: 1647

SEQ ID NO: 1687 - DNA, 601 bp, Human; identical to SEQ ID NO: 1648

SEQ ID NO: 1688 - DNA, 601 bp, Human; identical to SEQ ID NO: 1649

SEQ ID NO: 1689 - DNA, 601 bp, Human; identical to SEQ ID NO: 1650

SEQ ID NO: 1690 - DNA, 601 bp, Human; identical to SEQ ID NO: 1651

SEQ ID NO: 1691 - DNA, 601 bp, Human; identical to SEQ ID NO: 1652

SEQ ID NO: 1692 - DNA, 601 bp, Human; identical to SEQ ID NO: 1653

SEQ ID NO: 1693 - DNA, 601 bp, Human; identical to SEQ ID NO: 1654

SEQ ID NO: 1694 - DNA, 601 bp, Human; identical to SEQ ID NO: 1655

SEQ ID NO: 1695 - DNA, 601 bp, Human; identical to SEQ ID NO: 1656

SEQ ID NO: 1696 - DNA, 601 bp, Human; identical to SEQ ID NO: 1657

SEQ ID NO: 1697 - DNA, 601 bp, Human; identical to SEQ ID NO: 1658

SEQ ID NO: 1698 - DNA, 601 bp, Human; identical to SEQ ID NO: 1659

SEQ ID NO: 1699 - DNA, 601 bp, Human; identical to SEQ ID NO: 1660

SEQ ID NO: 1700 - DNA, 601 bp, Human; identical to SEQ ID NO: 1661

SEQ ID NO: 1701 - DNA, 601 bp, Human; identical to SEQ ID NO: 1662

SEQ ID NO: 1702 - DNA, 601 bp, Human; identical to SEQ ID NO: 1663

SEQ ID NO: 1703 - DNA, 601 bp, Human; identical to SEQ ID NO: 1664

SEQ ID NO: 1704 - DNA, 601 bp, Human; identical to SEQ ID NO: 1665

SEQ ID NO: 1705 - DNA, 601 bp, Human; identical to SEQ ID NO: 1666

SEQ ID NO: 1706 - DNA, 601 bp, Human; identical to SEQ ID NO: 1667

SEQ ID NO: 1707 - DNA, 601 bp, Human; identical to SEQ ID NO: 1668

SEQ ID NO: 1708 - DNA, 601 bp, Human; identical to SEQ ID NO: 1669

SEQ ID NO: 1709 - DNA, 601 bp, Human; identical to SEQ ID NO: 1670

SEQ ID NO: 1710 - DNA, 601 bp, Human; identical to SEQ ID NO: 1671

SEQ ID NO: 1711 - DNA, 601 bp, Human; identical to SEQ ID NO: 1672

SEQ ID NO: 1712 - DNA, 601 bp, Human; identical to SEQ ID NO: 1673

SEQ ID NO: 1713 - DNA, 601 bp, Human; identical to SEQ ID NO: 1674

SEQ ID NO: 1714 - DNA, 601 bp, Human; identical to SEQ ID NO: 1675

SEQ ID NO: 1715 - DNA, 601 bp, Human
gttcaagctttcaactgtattttgtaattcctacaatgaatttttcatttctggaatttctgtctggttttctaaaaaatagctttctctagtaaaattttaatttagatcctatatttttccgatttctttgtgttggttttttgactttctcttggatcttattgcgcttctttaaaatcaatattttgaattccttagctggtatttcaaggatttcattttctttagggtccactgctggagagttagtgtgagtctttggggatgttgcagcgctcttttttttttttttttttttaatacttctagagttgttactctgtttcattctcatctggataaactatctcttctttatttttgaatttactttggcaggatttttttttttcccttgagaatgtgaatataacgtatgttgtatatagttgtttgacttcagttctgggtactttcagtgacagagactctgagtttcttggttatagttggcctttttgtggtagctttctcaaatgctagtgatagtaatgatgtgcttgggtgtgtgagcagcatcctcaccgtctcccgcggggcctggaaggcagagttctca

SEQ ID NO: 1716 - DNA, 601 bp, Human
gcctggtgctgtgggggcgcgctgactcgtggtccgcccctgccccaagacttcaggtgtatatgggattggatcagctatcatcccgagctcatggcacgtacagtgagccatgtgttaatccatagactaacctttttccttttaaaaaattagttgttttgtataatgtagcgagcactgtttccaacaaaaatctaggatcttggcagtaaccactacctgttttactctttcctctttcacttttcgctaggagtaatcattagctcccatcttgtattaatttttttttttttttactgtatctaatttccaaaaaaaaaaaatctgtgtgtttgcaactaagttatcttcctatgtgtaactttttgggacttaagtgataacagtaatattactaaaaatcaaccgtattgttgtttttcactgtggtttattccttctgactgctgtgatattttgtgtggatctgctgaagttaatttatccactcttctgttgatgggcctttggtcatttccaggtttttgctcttctgaagagcatgagatattctttcacattttctgctgtgcatgttccatatgtgcatggtttt

SEQ ID NO: 1717 - DNA, 601 bp, Human
gtggtccgcccctgccccaagacttcaggtgtatatgggattggatcagctatcatcccgagctcatggcacgtacagtgagccatgtgttaatccatagactaacctttttccttttaaaaaattagttgttttgtataatgtagcgagcactgtttccaacaaaaatctaggatcttggcagtaaccactacctgttttactctttcctctttcacttttcgctaggagtaatcattagctcccatcttgtattaatttttttttttttttactgtatctaatttccaaaaaaaaaaaatctgtgtgtttgcaactaagttatcttcctatgtgtaactttttgggacttaagtgataacagtaatattactaaaaatcaaccgtattgttgtttttcactgtggtttattccttctgactgctgtgatattttgtgtggatctgctgaagttaatttatccactcttctgttgatgggcctttggtcatttccaggtttttgctcttctgaagagcatgagatattctttcacattttctgctgtgcatgttccatatgtgcatggttttctcttttatatagacctgagtggagtaa

SEQ ID NO: 1718 - DNA, 601 bp, Human
ttctggctgcaatgtgagtccaggtcaggtatcccttaaattcttttccagctcacctcagagactagattactaggttactgttactattacgtccaccccttattatttgaacccagcattccttggtcaagacattcttcttgggtgcatgtatgtatatatatctatatacatacacactgacctatatgtattatgtgcaacatgatattttgaaatatgtatacattgaggaatggctacattgagctaattacatatgtgttacctcacatatttcgtttttttttttttttttgtgaggactcttaaaatctactctcttagtgatacgcaagaataaattacattgttattaactgtggttgtggtggtgtttaatggatctcttgggcaggtcattcttgttgactaatggaatgtccccttccccagcctggattccctcatgttgcactgctacttgattctccctggtcctggggaagagcagactgtgttccttctgccgcttctccatgcccaccaccccagatcctaaagggaatttcctgttctcaccttgataacaatcttaattaattgattatctcacttt

SEQ ID NO: 1719 - DNA, 601 bp, Human
acctcttatgtcacgttgctgaattgacagttgtgtcttctaccacctaggaaaaaattgctttccaaaataaaatgaatagcaacttgttttcaatgggtcagaaatcaccaactacagcccatggttcaaagcctgccctggcctgtttttgtacaaccccaggactaagaatggttttcacatttttacaggattgttacaaaacaaagaggaatatgccacagagacctatgtgacctgcaaaacccaaaatgtagataccacatggttctttgtaaaaaaaaaaaaaaaaaaaaaaggtgctgatctgtgttctaaatagtttttggggtgggaatggggaggtatagtctgtgtttttctcaaaacaatgacatttaatttctcttagaagcagattgaagatgcatgagaaacatttgtactttgtactctcttacctcttcaggtgtaattggcagctggggctttattcattgagttttcatttattgagagcctattgtgagctaagcagtaggaattttgttaaattttggaatgctttcagggagcctatagactaatggtgtgaaggacatatccatattcattaact

SEQ ID NO: 1720 - DNA, 601 bp, Human
tagacctaacagatatttatagaacattctccccacagccgcagaacatatattcttctcatcagtgcatggaacgtttttcgagatggactatatgtcataccaaaaaacaagtctcaataaattgaaaaaaaccaaaatgataccaagtatcttctcagaccacagtggaatgaaactagaaatcaattcacagagaaactctcataactatacaaataattggaaattaaatagcctgcttctgaatgaattttgagtcaacaatgtagttaagatggaaattaaaaaaaaattgaaacaaatgaaagtggatacacagcataaaacctgcgggatacagcaaaagcagggctaagtgggaagtttatagtgttaaatgcctacatcaaaaatagagatcacaaattaacaacctaatatcacacttcaaggaactagaaaaaaaagaaaaaaccaaattgaaacctagcagaacagaagtaacaaataccagagcagaactaaatgaaatggagaccaaaaaatgcagtacaaaggataaaaaaaatgagaagttggttctttggaaagataatattcatagactgttggtcagatt

SEQ ID NO: 1721 - DNA, 601 bp, Human; identical to SEQ ID NO: 365

SEQ ID NO: 1722 - DNA, 601 bp, Human; identical to SEQ ID NO: 366

SEQ ID NO: 1723 - DNA, 601 bp, Human; identical to SEQ ID NO: 367

SEQ ID NO: 1724 - DNA, 601 bp, Human; identical to SEQ ID NO: 368

SEQ ID NO: 1725 - DNA, 601 bp, Human; identical to SEQ ID NO: 369

SEQ ID NO: 1726 - DNA, 601 bp, Human; identical to SEQ ID NO: 370

SEQ ID NO: 1727 - DNA, 601 bp, Human
attgaggagcgcataggctttgagggcagacctggcctggaatctttcagagctccttgccttcttgcctctccttttccttgtctagaaaagggaggtaagagtacttcccacttcacaggactgttgtgaggctgaaatgagatgatatgcctggaggtacaatcataataacatactaacatattaatcataataacatattagcaacaatcaggataaaagtaatagctaagatatattgagtccttatgtcccagccatgactcaaagcaccttacatgtattatcttctttttctttttttcttttactgatacataatattttacatatttatgaggtacatgtgagtgttttttacatgcattgaacgtgtaatgattaagtcagggtatttggggtatccatcacctggaatagttatcatttctatgaattggtaatatttcaagtcctctcttttagctactttgaaatatacaatatattgttgctaactatagacactctagtctgctatgtaacattagaacgtatttcttctatctaactataattcagtacctattcaccaacctcttcatttcccccttctacc

SEQ ID NO: 1728 - DNA, 601 bp, Human
cactgcaagctccgcctcctgggttcatgccattctcctgcctcagcctcctgagtagctgggactacaggcgcccgccaccacactggctaattttttttattattattatttttagtagaggcggggtttcaccatgttagccaggatggtctcaatctcctggccttaggattttaagaaaactatattatcacctagccatcatgagttaaacacagctccaaaatattaaattgtgtctaaaatggtcggcatggctttctgggtacccactaattacagttcccatatcatcagaaaaaaaaaagtatatatccgtaattttttttttttgacagtctcgctgtgttgcctaggctggagcagtggcgcgatcttggctcactgcaacctctgcctcccaggttcaagcaattctcctgcctcagcctcccaaggaactgggattacaggcgctcatcaccatgtcttgctaatttttgtatttttagtagagacgaggtttcaccatggtggccaagcgggtggtctcaaactcccaacctcaagtcatcctcccacctcggcctcgcaaagtgctgggattacaggcctgagc

SEQ ID NO: 1729 - DNA, 601 bp, Human
ggattttaagaaaactatattatcacctagccatcatgagttaaacacagctccaaaatattaaattgtgtctaaaatggtcggcatggctttctgggtacccactaattacagttcccatatcatcagaaaaaaaaaagtatatatccgtaattttttttttttgacagtctcgctgtgttgcctaggctggagcagtggcgcgatcttggctcactgcaacctctgcctcccaggttcaagcaattctcctgcctcagcctcccaaggaactgggattacaggcgctcatcaccatgtgttgctaatttttgtatttttagtagagacgaggtttcaccatggtggccaagcgggtggtctcaaactcccaacctcaagtcatcctcccacctcggcctcgcaaagtgctgggattacaggcctgagccactgcactcagctacaaatcttcttaatgattcagtacacccagacttttcttcttttttttttttttttttttgttttttgaggaagagtcttgttctgttgcccaggctggaggctggagtgcagtggtgccatcttggttcactgcaacttccacctcccaagttta

SEQ ID NO: 1730 - DNA, 601 bp, Human
ccatcatgagttaaacacagctccaaaatattaaattgtgtctaaaatggtcggcatggctttctgggtacccactaattacagttcccatatcatcagaaaaaaaaaagtatatatccgtaattttttttttttgacagtctcgctgtgttgcctaggctggagcagtggcgcgatcttggctcactgcaacctctgcctcccaggttcaagcaattctcctgcctcagcctcccaaggaactgggattacaggcgctcatcaccatgtcttgctaatttttgtatttttagtagagacraggtttcaccatggtggccaagcgggtggtctcaaactcccaacctcaagtcatcctcccacctcggcctcgcaaagtgctgggattacaggcctgagccactgcactcagctacaaatcttcttaatgattcagtacacccagacttttcttcttttttttttttttttttttgttttttgaggaagagtcttgttctgttgcccaggctggaggctggagtgcagtggtgccatcttggttcactgcaacttccacctcccaagtttaagagatctcctgcctcagtatcccaagtaa

SEQ ID NO: 1731 - DNA, 601 bp, Human
tctatagcagcaaaattcataatagccagaaagtcaaaacaacccaagtgtctatcaataggtgaatggataaacaaaatgtgctattatatatacacaatgaaacactgttcaccctttaaaaagaatgaaattctgatacatgctacaatgtggatgaagcttgaaaatattatgttaagtgaaataagccagacacacacaaaaaatattgtatgattccacttatataaaacacctagaataggcaaattcagtcagagactattggagttgctagaaatgtaatgtaggcttttcttttttttttttgagactgagttttgctcttgttgcccaggctggagtgcaatagcgcaatcttggctcactgcaacctccgcctcccgggttcaagtgattctcctgcctcagcttcccgagtagctgggattacaggcatgtgccaccacggccggctagttttgtatttttagtagagatgaggtttctccatgttggtcaggctggtctcgaactcccaacctcaggtgatccgcctgcctcagcctcccaaagtgacttatcacacagcacctggctatgtttgtttattattctt

SEQ ID NO: 1732 - DNA, 601 bp, Human
tagagatgaggtttctccatgttggtcaggctggtctcgaactcccaacctcaggtgatccgcctgcctcagcctcccaaagtgacttatcacacagcacctggctatgtttgtttattattcttttttcccctcacttctggagacctaggcataggtctttctatttgtttgttctatttgtttgttctatttgtttttctccctctgtttttaaattatgaaatcatgtcgagtcaaaaattaacttagaatgctgttctaataacattatatggaattctcatttttgttattttgtttttttttccttatccaagaaagaccctaactttattggcaagcatgtttatatttccaagtatattgtttttgtttgtttaaacatgttatgaatttttagagattattttttctttttggtgctgaggtgaaagaacataccctgtattgtttctgctttgtaaaatgtattggatctttttgtgacctggtgtaaaaacaattaaaaatatttgtatgatactggccgggcacggtagctcatgcctgtaatcccagcattttggtgggtggatcacttgagatcaggagttcgaga

SEQ ID NO: 1733 - DNA, 601 bp, Human; identical to SEQ ID NO: 1727

SEQ ID NO: 1734 - DNA, 601 bp, Human; identical to SEQ ID NO: 1728

SEQ ID NO: 1735 - DNA, 601 bp, Human; identical to SEQ ID NO: 1729

SEQ ID NO: 1736 - DNA, 601 bp, Human; identical to SEQ ID NO: 1730

SEQ ID NO: 1737 - DNA, 601 bp, Human; identical to SEQ ID NO: 1731

SEQ ID NO: 1738 - DNA, 601 bp, Human; identical to SEQ ID NO: 1732

SEQ ID NO: 1739 - DNA, 601 bp, Human; identical to SEQ ID NO: 543

SEQ ID NO: 1740 - DNA, 601 bp, Human; identical to SEQ ID NO: 544

SEQ ID NO: 1741 - DNA, 601 bp, Human; identical to SEQ ID NO: 545

SEQ ID NO: 1742 - DNA, 601 bp, Human; identical to SEQ ID NO: 546

SEQ ID NO: 1743 - DNA, 601 bp, Human; identical to SEQ ID NO: 421

SEQ ID NO: 1744 - DNA, 601 bp, Human; identical to SEQ ID NO: 422

SEQ ID NO: 1745 - DNA, 601 bp, Human; identical to SEQ ID NO: 423

SEQ ID NO: 1746 - DNA, 601 bp, Human; identical to SEQ ID NO: 424

SEQ ID NO: 1747 - DNA, 601 bp, Human; identical to SEQ ID NO: 425

SEQ ID NO: 1748 - DNA, 601 bp, Human; identical to SEQ ID NO: 426

SEQ ID NO: 1749 - DNA, 601 bp, Human; identical to SEQ ID NO: 427

SEQ ID NO: 1750 - DNA, 601 bp, Human; identical to SEQ ID NO: 428

SEQ ID NO: 1751 - DNA, 601 bp, Human; identical to SEQ ID NO: 429

SEQ ID NO: 1752 - DNA, 601 bp, Human; identical to SEQ ID NO: 430

SEQ ID NO: 1753 - DNA, 601 bp, Human; identical to SEQ ID NO: 431

SEQ ID NO: 1754 - DNA, 601 bp, Human; identical to SEQ ID NO: 432

SEQ ID NO: 1755 - DNA, 601 bp, Human; identical to SEQ ID NO: 433

SEQ ID NO: 1756 - DNA, 601 bp, Human; identical to SEQ ID NO: 434

SEQ ID NO: 1757 - DNA, 601 bp, Human; identical to SEQ ID NO: 435

SEQ ID NO: 1758 - DNA, 601 bp, Human; identical to SEQ ID NO: 436

SEQ ID NO: 1759 - DNA, 601 bp, Human; identical to SEQ ID NO: 437

SEQ ID NO: 1760 - DNA, 601 bp, Human; identical to SEQ ID NO: 438

SEQ ID NO: 1761 - DNA, 601 bp, Human; identical to SEQ ID NO: 439

SEQ ID NO: 1762 - DNA, 601 bp, Human; identical to SEQ ID NO: 440

SEQ ID NO: 1763 - DNA, 601 bp, Human; identical to SEQ ID NO: 441

SEQ ID NO: 1764 - DNA, 601 bp, Human; identical to SEQ ID NO: 442

SEQ ID NO: 1765 - DNA, 601 bp, Human; identical to SEQ ID NO: 443

SEQ ID NO: 1766 - DNA, 601 bp, Human; identical to SEQ ID NO: 444

SEQ ID NO: 1767 - DNA, 601 bp, Human; identical to SEQ ID NO: 445

SEQ ID NO: 1768 - DNA, 601 bp, Human; identical to SEQ ID NO: 446

SEQ ID NO: 1769 - DNA, 601 bp, Human; identical to SEQ ID NO: 447

SEQ ID NO: 1770 - DNA, 601 bp, Human; identical to SEQ ID NO: 448

SEQ ID NO: 1771 - DNA, 601 bp, Human; identical to SEQ ID NO: 449

SEQ ID NO: 1772 - DNA, 601 bp, Human; identical to SEQ ID NO: 450

SEQ ID NO: 1773 - DNA, 601 bp, Human; identical to SEQ ID NO: 451

SEQ ID NO: 1774 - DNA, 601 bp, Human; identical to SEQ ID NO: 452

SEQ ID NO: 1775 - DNA, 601 bp, Human; identical to SEQ ID NO: 453

SEQ ID NO: 1776 - DNA, 601 bp, Human; identical to SEQ ID NO: 454

SEQ ID NO: 1777 - DNA, 601 bp, Human; identical to SEQ ID NO: 455

SEQ ID NO: 1778 - DNA, 601 bp, Human; identical to SEQ ID NO: 456

SEQ ID NO: 1779 - DNA, 601 bp, Human; identical to SEQ ID NO: 457

SEQ ID NO: 1780 - DNA, 601 bp, Human; identical to SEQ ID NO: 458

SEQ ID NO: 1781 - DNA, 601 bp, Human; identical to SEQ ID NO: 459

SEQ ID NO: 1782 - DNA, 601 bp, Human; identical to SEQ ID NO: 460

SEQ ID NO: 1783 - DNA, 601 bp, Human; identical to SEQ ID NO: 461

SEQ ID NO: 1784 - DNA, 601 bp, Human; identical to SEQ ID NO: 462

SEQ ID NO: 1785 - DNA, 601 bp, Human; identical to SEQ ID NO: 463

SEQ ID NO: 1786 - DNA, 601 bp, Human; identical to SEQ ID NO: 464

SEQ ID NO: 1787 - DNA, 601 bp, Human; identical to SEQ ID NO: 465

SEQ ID NO: 1788 - DNA, 601 bp, Human; identical to SEQ ID NO: 466

SEQ ID NO: 1789 - DNA, 601 bp, Human; identical to SEQ ID NO: 467

SEQ ID NO: 1790 - DNA, 601 bp, Human; identical to SEQ ID NO: 468

SEQ ID NO: 1791 - DNA, 601 bp, Human; identical to SEQ ID NO: 469

SEQ ID NO: 1792 - DNA, 601 bp, Human; identical to SEQ ID NO: 470

SEQ ID NO: 1793 - DNA, 601 bp, Human; identical to SEQ ID NO: 471

SEQ ID NO: 1794 - DNA, 601 bp, Human; identical to SEQ ID NO: 472

SEQ ID NO: 1795 - DNA, 601 bp, Human; identical to SEQ ID NO: 473

SEQ ID NO: 1796 - DNA, 601 bp, Human; identical to SEQ ID NO: 474

SEQ ID NO: 1797 - DNA, 601 bp, Human; identical to SEQ ID NO: 475

SEQ ID NO: 1798 - DNA, 601 bp, Human; identical to SEQ ID NO: 476

SEQ ID NO: 1799 - DNA, 601 bp, Human; identical to SEQ ID NO: 477

SEQ ID NO: 1800 - DNA, 601 bp, Human; identical to SEQ ID NO: 478

SEQ ID NO: 1801 - DNA, 601 bp, Human; identical to SEQ ID NO: 186

SEQ ID NO: 1802 - DNA, 601 bp, Human; identical to SEQ ID NO: 187

SEQ ID NO: 1803 - DNA, 601 bp, Human; identical to SEQ ID NO: 188

SEQ ID NO: 1804 - DNA, 601 bp, Human; identical to SEQ ID NO: 577

SEQ ID NO: 1805 - DNA, 601 bp, Human; identical to SEQ ID NO: 578

SEQ ID NO: 1806 - DNA, 601 bp, Human; identical to SEQ ID NO: 579

SEQ ID NO: 1807 - DNA, 601 bp, Human; identical to SEQ ID NO: 580

SEQ ID NO: 1808 - DNA, 601 bp, Human; identical to SEQ ID NO: 581

SEQ ID NO: 1809 - DNA, 601 bp, Human; identical to SEQ ID NO: 582

SEQ ID NO: 1810 - DNA, 601 bp, Human; identical to SEQ ID NO: 583

SEQ ID NO: 1811 - DNA, 601 bp, Human; identical to SEQ ID NO: 584

SEQ ID NO: 1812 - DNA, 601 bp, Human; identical to SEQ ID NO: 585

SEQ ID NO: 1813 - DNA, 601 bp, Human; identical to SEQ ID NO: 586

SEQ ID NO: 1814 - DNA, 601 bp, Human; identical to SEQ ID NO: 587

SEQ ID NO: 1815 - DNA, 601 bp, Human; identical to SEQ ID NO: 588

SEQ ID NO: 1816 - DNA, 601 bp, Human; identical to SEQ ID NO: 589

SEQ ID NO: 1817 - DNA, 601 bp, Human; identical to SEQ ID NO: 590

SEQ ID NO: 1818 - DNA, 601 bp, Human; identical to SEQ ID NO: 591

SEQ ID NO: 1819 - DNA, 601 bp, Human; identical to SEQ ID NO: 592

SEQ ID NO: 1820 - DNA, 601 bp, Human; identical to SEQ ID NO: 593

SEQ ID NO: 1821 - DNA, 601 bp, Human; identical to SEQ ID NO: 594

SEQ ID NO: 1822 - DNA, 601 bp, Human; identical to SEQ ID NO: 595

SEQ ID NO: 1823 - DNA, 601 bp, Human; identical to SEQ ID NO: 596

SEQ ID NO: 1824 - DNA, 601 bp, Human; identical to SEQ ID NO: 597

SEQ ID NO: 1825 - DNA, 601 bp, Human; identical to SEQ ID NO: 598

SEQ ID NO: 1826 - DNA, 601 bp, Human; identical to SEQ ID NO: 599

SEQ ID NO: 1827 - DNA, 601 bp, Human; identical to SEQ ID NO: 600

SEQ ID NO: 1828 - DNA, 601 bp, Human; identical to SEQ ID NO: 601

SEQ ID NO: 1829 - DNA, 601 bp, Human; identical to SEQ ID NO: 602

SEQ ID NO: 1830 - DNA, 601 bp, Human; identical to SEQ ID NO: 603

SEQ ID NO: 1831 - DNA, 601 bp, Human; identical to SEQ ID NO: 720

SEQ ID NO: 1832 - DNA, 601 bp, Human
taaaatgtcattgaaaagtagttcataagaaatgtgggtgtgtcaattacccagttagatgacgaccatcacgcagaagaaatgactttttttttttttttttttttgagacagagtctcactctgtcacccaggctggagttccgtggtgcgatctcagctcattgcaacctccacctccctggttcaagcaattctcctgcctcagcctccctagtagctggtattacaggcatgcaccaccacgcctggctaatttttgtatttttagtagagacagggtttcctgtctcctatgtcrtttcctgtttcctatgttggccaggctggtctcaaacttctggccttaagtgatccacatgccttggcctcccaaagtgctgggattacaggcatgagccatcgtgcctggccagaaatgatgactttcttagcaactcttcctccactgctcctttaaatccaacttgaactcagtctcttcatggacaatttaagtctcctgccggccaaaaagacaaaaactgaaacgagatagcaatccctcctcattttccgctcaaagagagaagtaacaggaaacagaaagaaaaacttatcc

SEQ ID NO: 1833 - DNA, 601 bp, Human
ttaacctttttcctccagctggtaactgttggccaatgcttgattttgattccattagtcagctcttttatatagcttttgcaaaattgtgttgatgttagtgagtttttttaaagataacacataaatctaacctttacagtcaaaaatcatttccctaagccttggctagcttagatgcaagatatgtcaaaagctgatcttcactgagctaactctgagtggctagcacacagggagcagctgcactgaataaaagcagtgctatatctcattgattagtcatggctccctagagcaycatgtcagaaaagaccgtaaggctctgagggggctcaatgggaaagagttccattatcgattaggaatgtctgccatgggcatgggctggattttgacaactggactgacttatttttgccatccaaagtctaggttgataaacagcggtagggagttggggtaaagcctacccactagtcagcagctgctgaaaatgaggactgatcttcagacagcaaacaaatataacataacgtggatctttacacagaagggtcagcactgtctatatgtcaagttaatataataccccctggta

SEQ ID NO: 1834 - DNA, 601 bp, Human
aaatgaggcaaattgttgtaatttgcaaaatgcctttgagtcagtcttaggtagattcaaagttaaatggcagcaaaccctccaaaactttgacctaagtgttcagttacttctcacttatttctccttaagtgcctgtgttgaacaaatctctcatttaacctttttcctccagctggtaactgttggccaatgcttgattttgattccattagtcagctcttttatatagcttttgcaaaattgtgttgatgttagtgagtttttttaaagataacacataaatctaacctttacagtcaaaaatcatttccctaagccttggctagcttagatgcaagatatgtcaaaagctgatcttcactgagctaactctgagtggctagcacacagggagcagctgcactgaataaaagcagtgctatatctcattgattagtcatggctccctagagcatcatgtcagaaaagaccgtaaggctctgagggggctcaatgggaaagagttccattatcgattaggaatgtctgccatgggcatgggctggattttgacaactggactgacttatttttgccatccaaagtctaggttgataaa

SEQ ID NO: 1835 - DNA, 601 bp, Human
taatgtgccatattaaaaggctttgtaaattatatggcactatataaatgtgagttattataattattgaataggccattaattaaatacagtgatattagaaaaattgaattttaattttcattagtcttcgtaagtgttaactaatgacactttggcaaatcttaatatcactgctcatttggaagttgagaaaaatgaggcaaattgttgtaatttgcaaaatgcctttgagtcagtcttaggtagattcaaagttaaatggcagcaaaccctccaaaactttgacctaagtgttcarttacttctcacttatttctccttaagtgcctgtgttgaacaaatctctcatttaacctttttcctccagctggtaactgttggccaatgcttgattttgattccattagtcagctcttttatatagcttttgcaaaattgtgttgatgttagtgagtttttttaaagataacacataaatctaacctttacagtcaaaaatcatttccctaagccttggctagcttagatgcaagatatgtcaaaagctgatcttcactgagctaactctgagtggctagcacacagggagcagctgcac

SEQ ID NO: 1836 - DNA, 601 bp, Human
acatattaaacatatacattttgatgggtttggacatatgcctatatccttgataccatcatcacaatcatggtactatatgtatccatcacctccaaaatttccttgtgttgtgtttttttcttttgtgtgtgtgtgtgtgtgtatgtgtgtgtgtgtgaataacatgaaatctatcctctcaacattttaaagtgtacaatagcataattaactataggtactatgttgtatagcagatctctataattattcatctttccataaaactgaatatttctaaatattgaacttagagtcmcaatataacatatactcacccacacaaaatatctctttaaagaggcttgcatagaaagctatttcattttctccaaaaaagaataactctgagcactttgggaggccgaggtgggcagatcacgaggtcaggagattgagaccagcctggccaacacggtgaaaccccgtctctactaaaaatacaaaaaattagccgggcgtggtggtggatacctgtagtcccagctactcgggaggctgaggcagaagaatggcgtgaacccaggaggcggagcttgcagtgagccaagattgcgcc

SEQ ID NO: 1837 - DNA, 601 bp, Human
gccaataaatctagtcttattttaggaacagactagaggggtgtggcctaattttcacaagtggagtcaatatcatcatagtctgaaagtcatcagtaatttataacctacaaaatacaggaataatattttatagcctgaggataaattctttttttacagcacagaaatgcattcttagtgtaagaagcaatcctatacctcttgttccaagaagataaggccaaaagttatgatgtctctcaaagttttaagaacataaggagttaatataaagaatgtgctcaccaactagtttgtrtgtatactaaggacaaacaatgataaaatgaatttaaggttgcagagatttaagctaggttgaagcaaagactagaagcagagaactgaggtacagacttagcttgcccaagagttttctttggatgtactgagagtccctggtcttgggtgatgaaaagagtaatttgggctgaaagcaaaaagatgccctttcttatttactgaatggttttccttttcttatgcccagtatttggccaagaatctggtaaggagtaggcacccgacaagcatttgtgaaatgtaactgaacaatttg

SEQ ID NO: 1838 - DNA, 601 bp, Human
ccgggcacagtggctcacacctgtaatcccagcactttgggaggccgaggcaggtggatcatgaggtcaggagttcaataccagcctgggcaagatggtgaaaccccatctctactaaaaatacaaaaattggccaggtgtggtggtgggcacctgcaatcccagctactcaggaggctgacgcagagaattgcttgaacccgggaggcagaggttgcagtgagctgagattgtgccactgcacttcagcatgggcgagagagcgagactccatctcaaaaaaaaaaaaaaaaaaaaaaaaagctaaccctctagaaacattcataaatgtacaatcatgcataagaaaccccactgagcatggcaattagagcaaaacatacactacaatggaaggaaagactacatttgaaccaagtattaattcccatttcttcagtatcaatctcttcttgctcacatagattcttctcttcacctctactcttttctacctttcctatctgtctctgttctactctcagatgaacttgatgtgttagaaaagaaatctgtatagtgcattcttttttcaaatcatggaacaatacctattaaatat

SEQ ID NO: 1839 - DNA, 601 bp, Human; identical to SEQ ID NO: 721

SEQ ID NO: 1840 - DNA, 601 bp, Human; identical to SEQ ID NO: 722

SEQ ID NO: 1841 - DNA, 601 bp, Human; identical to SEQ ID NO: 723

SEQ ID NO: 1842 - DNA, 601 bp, Human; identical to SEQ ID NO: 724

SEQ ID NO: 1843 - DNA, 601 bp, Human; identical to SEQ ID NO: 660

SEQ ID NO: 1844 - DNA, 601 bp, Human; identical to SEQ ID NO: 659

SEQ ID NO: 1845 - DNA, 601 bp, Human; identical to SEQ ID NO: 658

SEQ ID NO: 1846 - DNA, 601 bp, Human; identical to SEQ ID NO: 657

SEQ ID NO: 1847 - DNA, 601 bp, Human; identical to SEQ ID NO: 656

SEQ ID NO: 1848 - DNA, 601 bp, Human; identical to SEQ ID NO: 655

SEQ ID NO: 1849 - DNA, 601 bp, Human; identical to SEQ ID NO: 654

SEQ ID NO: 1850 - DNA, 601 bp, Human; identical to SEQ ID NO: 653

SEQ ID NO: 1851 - DNA, 601 bp, Human; identical to SEQ ID NO: 652

SEQ ID NO: 1852 - DNA, 601 bp, Human; identical to SEQ ID NO: 651

SEQ ID NO: 1853 - DNA, 601 bp, Human; identical to SEQ ID NO: 650

SEQ ID NO: 1854 - DNA, 601 bp, Human; identical to SEQ ID NO: 649

SEQ ID NO: 1855 - DNA, 601 bp, Human; identical to SEQ ID NO: 648

SEQ ID NO: 1856 - DNA, 601 bp, Human; identical to SEQ ID NO: 647

SEQ ID NO: 1857 - DNA, 601 bp, Human; identical to SEQ ID NO: 646

SEQ ID NO: 1858 - DNA, 601 bp, Human; identical to SEQ ID NO: 645

SEQ ID NO: 1859 - DNA, 601 bp, Human; identical to SEQ ID NO: 644

SEQ ID NO: 1860 - DNA, 601 bp, Human; identical to SEQ ID NO: 643

SEQ ID NO: 1861 - DNA, 601 bp, Human; identical to SEQ ID NO: 642

SEQ ID NO: 1862 - DNA, 601 bp, Human; identical to SEQ ID NO: 641

SEQ ID NO: 1863 - DNA, 601 bp, Human; identical to SEQ ID NO: 640

SEQ ID NO: 1864 - DNA, 601 bp, Human; identical to SEQ ID NO: 639

SEQ ID NO: 1865 - DNA, 601 bp, Human; identical to SEQ ID NO: 638

SEQ ID NO: 1866 - DNA, 601 bp, Human; identical to SEQ ID NO: 637

SEQ ID NO: 1867 - DNA, 601 bp, Human; identical to SEQ ID NO: 636

SEQ ID NO: 1868 - DNA, 601 bp, Human; identical to SEQ ID NO: 635

SEQ ID NO: 1869 - DNA, 601 bp, Human; identical to SEQ ID NO: 634

SEQ ID NO: 1870 - DNA, 601 bp, Human; identical to SEQ ID NO: 633

SEQ ID NO: 1871 - DNA, 601 bp, Human; identical to SEQ ID NO: 632

SEQ ID NO: 1872 - DNA, 601 bp, Human; identical to SEQ ID NO: 631

SEQ ID NO: 1873 - DNA, 601 bp, Human; identical to SEQ ID NO: 630

SEQ ID NO: 1874 - DNA, 601 bp, Human; identical to SEQ ID NO: 629

SEQ ID NO: 1875 - DNA, 601 bp, Human; identical to SEQ ID NO: 628

SEQ ID NO: 1876 - DNA, 601 bp, Human; identical to SEQ ID NO: 627

SEQ ID NO: 1877 - DNA, 601 bp, Human; identical to SEQ ID NO: 626

SEQ ID NO: 1878 - DNA, 601 bp, Human; identical to SEQ ID NO: 625

SEQ ID NO: 1879 - DNA, 601 bp, Human; identical to SEQ ID NO: 624

SEQ ID NO: 1880 - DNA, 601 bp, Human; identical to SEQ ID NO: 623

SEQ ID NO: 1881 - DNA, 601 bp, Human; identical to SEQ ID NO: 622

SEQ ID NO: 1882 - DNA, 601 bp, Human; identical to SEQ ID NO: 621

SEQ ID NO: 1883 - DNA, 601 bp, Human; identical to SEQ ID NO: 620

SEQ ID NO: 1884 - DNA, 601 bp, Human; identical to SEQ ID NO: 661

SEQ ID NO: 1885 - DNA, 601 bp, Human; identical to SEQ ID NO: 662

SEQ ID NO: 1886 - DNA, 601 bp, Human; identical to SEQ ID NO: 663

SEQ ID NO: 1887 - DNA, 601 bp, Human; identical to SEQ ID NO: 664

SEQ ID NO: 1888 - DNA, 601 bp, Human; identical to SEQ ID NO: 665

SEQ ID NO: 1889 - DNA, 601 bp, Human; identical to SEQ ID NO: 666

SEQ ID NO: 1890 - DNA, 601 bp, Human; identical to SEQ ID NO: 667

SEQ ID NO: 1891 - DNA, 601 bp, Human; identical to SEQ ID NO: 668

SEQ ID NO: 1892 - DNA, 601 bp, Human; identical to SEQ ID NO: 669

SEQ ID NO: 1893 - DNA, 601 bp, Human; identical to SEQ ID NO: 670

SEQ ID NO: 1894 - DNA, 601 bp, Human; identical to SEQ ID NO: 671

SEQ ID NO: 1895 - DNA, 601 bp, Human; identical to SEQ ID NO: 672

SEQ ID NO: 1896 - DNA, 601 bp, Human; identical to SEQ ID NO: 673

SEQ ID NO: 1897 - DNA, 601 bp, Human; identical to SEQ ID NO: 674

SEQ ID NO: 1898 - DNA, 601 bp, Human; identical to SEQ ID NO: 675

SEQ ID NO: 1899 - DNA, 601 bp, Human; identical to SEQ ID NO: 676

SEQ ID NO: 1900 - DNA, 601 bp, Human; identical to SEQ ID NO: 677

SEQ ID NO: 1901 - DNA, 601 bp, Human; identical to SEQ ID NO: 678

SEQ ID NO: 1902 - DNA, 601 bp, Human; identical to SEQ ID NO: 679

SEQ ID NO: 1903 - DNA, 601 bp, Human; identical to SEQ ID NO: 680

SEQ ID NO: 1904 - DNA, 601 bp, Human; identical to SEQ ID NO: 681

SEQ ID NO: 1905 - DNA, 601 bp, Human; identical to SEQ ID NO: 682

SEQ ID NO: 1906 - DNA, 601 bp, Human; identical to SEQ ID NO: 683

SEQ ID NO: 1907 - DNA, 601 bp, Human; identical to SEQ ID NO: 684

SEQ ID NO: 1908 - DNA, 601 bp, Human
cccccaggtggggagggtggggtggcagagtagaatgggggctgactccacatctgggtctcctcgaactggatgacttagtgaggttctccttatccccacgaggcaaggagaacaaagaggttggccctgccaggtggtgggtggaaccaggaggcctcataagctagagcatagtacagaggaggctgggccgggctggtcgggagccctgtgcaagctggaggtgcaaccaaatcctttcctccctgaccccatcagaggatactcagcctctaaattcagctccccaaggccccawtagcaagcatcccatggcctggatcctgggactgtgtggttaaaaacatgtcaggtggtggcatcattggaatcttaaaaattagaggtgttcccaggagatgacttgctcacaggtaaggcatacaagtccaaatcagccagggcattgcatcttccaggttttctgaggaaaggctgaggctttctgaactttctgcaaatggaacagaacatacttaaggctgcacctgaggtcctgtgcccatcagctgtcacctgcattccagtggctgagtgcagctcccctcgctgtctgctc

SEQ ID NO: 1909 - DNA, 601 bp, Human; identical to SEQ ID NO: 685

SEQ ID NO: 1910 - DNA, 601 bp, Human
atatatgctgaacaaacctgtggatgacatcatcatggagaacggcaaggtggtgggcgtgaagtctgagggagaggtgagcccttcccgtgcatgcagtgcagtcccatggttgaggcggggcttggtcactttctctgtgctgtcgagtctcctgctgcacagccccaagggtcttggagctgggaactgggggtccagaagtcttcagagtcatgactgtgggtgagaggtctctttcagaggccacatgccatgtctgtggtgcagaaagtgttcttgatcacagtgcctctggggkgcgggggggcgggcacccagcccgtgcgtcaaggcccacctatctgagcggcagggtagggccatgcattcaggaggggcagtagtgatggctccgaggaacgtcttgtctgccagagctgcctgcccttgctgtgagcgcagccccacgtctacctaagggagggatgtgacaggggcgaggacttctggtgccttctcaggtggcccgctgcaagcagctgatctgtgaccccagctacatcccggaccgtgtgcggaaggctggccaggttatccgcatcatctgtatccttagcca

SEQ ID NO: 1911 - DNA, 601 bp, Human
gcaggccacgacgtagatagagaaggccacccctagatgaccgggatgtcctttctggaacagcacttcttggtcctgttgggggcctcctggagctggctgacagaacccccagaggggagggaagaggacagtggctgatgataataatgcacgtgttaatttatgaaaccagcactgtcaaggatattgttaacatgtgatgttgattttcacaacactctcacagataggtaggcaaggcaggcaacatcacccccatctcacagaggacactcaggttcggggcagggaagtgacytggccaaggtcacacaaatctgagctcttaaggccaagcctgtctcaaggtcacagaagaattttgagacaagttctcaaacatttctctgccttatggacccaaacatccagtttctcctttatgcccaggttgcagttcagctcctgtttacattgagatctttgtgcaattcctaatatggcccagtttccctcacccaacatgttgggtggagcccagtatcttcaggctccagctgggcccgggcccctagcggaaggaaaaaaatcatggttccatgtgacatgctgtgtcttt

SEQ ID NO: 1912 - DNA, 601 bp, Human
tggggaggcaggggcctgagggacccagctccatccctccaggcaccctcaccaccctctgggccctctccgtggccatcttttccgtgggcggcatgatttcctccttcctcattggtatcatctctcagtggcttggaaggttcgcagctggagggcaggggtgggggaaacaggaagggagccactgctgggtgccctcaccctcacagcctcactctgtctgcctgccaggaaaagggccatgctggtcaacaatgtcctggcggtgctggggggcagcctcatgggcctggccaaygctgctgcctcctatgaaatgctcatccttggacgattcctcattggcgcctactcaggtactcacgggcaccacagccctgcctagcgccctgttctctttcaccatgcctgggctttcagatgggaatggacacctgccctcagccctctcttcttccctcgcccagggctgacatcagggctggtgcccatgtacgtgggggagattgctcccactcacctgcggggcgccctggggacgctcaaccaactggccattgttatcggcattctgatcgcccaggtgaccggagcaagc

SEQ ID NO: 1913 - DNA, 601 bp, Human; identical to SEQ ID NO: 198

SEQ ID NO: 1914 - DNA, 601 bp, Human; identical to SEQ ID NO: 199

SEQ ID NO: 1915 - DNA, 601 bp, Human; identical to SEQ ID NO: 200

SEQ ID NO: 1916 - DNA, 601 bp, Human; identical to SEQ ID NO: 201

SEQ ID NO: 1917 - DNA, 601 bp, Human; identical to SEQ ID NO: 202

SEQ ID NO: 1918 - DNA, 601 bp, Human; identical to SEQ ID NO: 203

SEQ ID NO: 1919 - DNA, 601 bp, Human; identical to SEQ ID NO: 204

SEQ ID NO: 1920 - DNA, 601 bp, Human; identical to SEQ ID NO: 205

SEQ ID NO: 1921 - DNA, 601 bp, Human; identical to SEQ ID NO: 206

SEQ ID NO: 1922 - DNA, 601 bp, Human; identical to SEQ ID NO: 207

SEQ ID NO: 1923 - DNA, 601 bp, Human; identical to SEQ ID NO: 208

SEQ ID NO: 1924 - DNA, 601 bp, Human; identical to SEQ ID NO: 209

SEQ ID NO: 1925 - DNA, 601 bp, Human; identical to SEQ ID NO: 210

SEQ ID NO: 1926 - DNA, 601 bp, Human; identical to SEQ ID NO: 211

SEQ ID NO: 1927 - DNA, 601 bp, Human; identical to SEQ ID NO: 212

SEQ ID NO: 1928 - DNA, 601 bp, Human; identical to SEQ ID NO: 213

SEQ ID NO: 1929 - DNA, 601 bp, Human; identical to SEQ ID NO: 214

SEQ ID NO: 1930 - DNA, 601 bp, Human; identical to SEQ ID NO: 215

SEQ ID NO: 1931 - DNA, 601 bp, Human; identical to SEQ ID NO: 216

SEQ ID NO: 1932 - DNA, 601 bp, Human; identical to SEQ ID NO: 217

SEQ ID NO: 1933 - DNA, 601 bp, Human; identical to SEQ ID NO: 218

SEQ ID NO: 1934 - DNA, 601 bp, Human; identical to SEQ ID NO: 219

SEQ ID NO: 1935 - DNA, 601 bp, Human; identical to SEQ ID NO: 224

SEQ ID NO: 1936 - DNA, 601 bp, Human
ttaaggcttaaattggtttggacataaaatcatttttttttcttagtggctgaccataattccttccatactgaatccagaaaataaaattagcacagatatagaacataaacagaccattataacaaacccttatgaataacctaatgcaataataaaatcacacatttgtccagaataagcatggtacttattttcaggccaagagaatttgcattctgtagcagagtgaaaatggcattccacagtcagcctaagcacttggtggagactctgagactagagggagcagatgcatttwaattgaacacgtgcttataggcattaagaaaagttgacattcttattaaagagaccaattaatctgcatcagttggaagccactttacagtcgaaaaagtgctctaggacctaatataaatgagactggagtagaaagagaatgaaaattcacttttctacaagggagccttttctaattgccctagagctgtgctgtttgaaatgctaatccttcctcttccatcccggactgggagtctggggtaacagaagccgaggagggtgaagacccccagatgctaaagtgaggggtgttcaa

SEQ ID NO: 1937 - DNA, 601 bp, Human
actatgattaattatttaaggcttaaattggtttggacataaaatcatttttttttcttagtggctgaccataattccttccatactgaatccagaaaataaaattagcacagatatagaacataaacagaccattataacaaacccttatgaataacctaatgcaataataaaatcacacatttgtccagaataagcatggtacttattttcaggccaagagaatttgcattctgtagcagagtgaaaatggcattccacagtcagcctaagcacttggtggagactctgagactagagrgagcagatgcattttaattgaacacgtgcttataggcattaagaaaagttgacattcttattaaagagaccaattaatctgcatcagttggaagccactttacagtcgaaaaagtgctctaggacctaatataaatgagactggagtagaaagagaatgaaaattcacttttctacaagggagccttttctaattgccctagagctgtgctgtttgaaatgctaatccttcctcttccatcccggactgggagtctggggtaacagaagccgaggagggtgaagacccccagatgctaaa

SEQ ID NO: 1938 - DNA, 601 bp, Human
ttggattaaggagggcctctctggcagccctacaggacagacatttctgcaatgatagaaatgacctatatctctgctgtctaaaacagtagtcactggccacgtgtgactatggagcacttgagatgtggtcagtgggactgaggaattgaggaactgaaagaattttatttaatttcaattaacatttaaatagctatccatggctggtggctatggtattagaacctgaagaatcccttcccatggcttgtgattgcaggataattgtgtataactcactgagttgtcgaggggactratgaaataaaaagcttaggaaaatgtctggaacataagtggcacaaaaaaataatagttgctattattccacagagttgcaaattaaagtactttaagtatatgccatttaaattaggctgtaaagcacttgaaatggacttttattaatgttaggcataatgttttgttttttagagttggtggataatcgatgtttgggtctgtatttgagcttacaaactaaaaatagcacacaaccattttgggatctcattgaaggagatagatgtctattccaagtggatcagcttgctgatac

SEQ ID NO: 1939 - DNA, 601 bp, Human
caggtaaagagtgtaatttctataatttcaaagctgtgatgtacttccaggagcagagtaagtaataatgatgggcaagcacaatggaaggccaggtattggattaaggagggcctctctggcagccctacaggacagacatttctgcaatgatagaaatgacctatatctctgctgtctaaaacagtagtcactggccacgtgtgactatggagcacttgagatgtggtcagtgggactgaggaattgaggaactgaaagaattttatttaatttcaattaacatttaaatagctatccwtggctggtggctatggtattagaacctgaagaatcccttcccatggcttgtgattgcaggataattgtgtataactcactgagttgtcgaggggactgatgaaataaaaagcttaggaaaatgtctggaacataagtggcacaaaaaaataatagttgctattattccacagagttgcaaattaaagtactttaagtatatgccatttaaattaggctgtaaagcacttgaaatggacttttattaatgttaggcataatgttttgttttttagagttggtggataatcgatgtttgggt

SEQ ID NO: 1940 - DNA, 601 bp, Human
attgtctttgtcactttctagcctctcatcctgttgattttttgatagtgcatgttaatcttgacattttaggatacaatcatttgcttatgtctaccctttccaaatacaaccgtctcattggcaaggacttttctgccctgttcatccaaagtgcctagaacagatggtccataaatacttgttgagcgagcacacgcatgaatacgtgtgcaaaggggctcaggtaaagagtgtaatttctataatttcaaagctgtgatgtacttccaggagcagagtaagtaataatgatgggcargcacaatggaaggccaggtattggattaaggagggcctctctggcagccctacaggacagacatttctgcaatgatagaaatgacctatatctctgctgtctaaaacagtagtcactggccacgtgtgactatggagcacttgagatgtggtcagtgggactgaggaattgaggaactgaaagaattttatttaatttcaattaacatttaaatagctatccatggctggtggctatggtattagaacctgaagaatcccttcccatggcttgtgattgcaggataattgtgtataactc

SEQ ID NO: 1941 - DNA, 601 bp, Human
ggcactgaatcccgttgcctcttttgcctatcccatcagtgcctctctctatcccatcgttcccatcagaatataaatatcatgtcatatccccacctcccaccattgaaagctctctctatacccctccagctacaccgcatctcctagctccagtgtatagcaaaacctttcagaagagttgtctattttccctgttcccactttttttatcctttgttctttctagaaagtacacaatcaggcttttggttccatcactcctctggacctgtgagcctcacgtgccttcctcctatcrctaaaaacctgcttactgccaaatctagtgttggctcccagtcctcctctaacctgacctctcagctgcatgtgacacagctgattactcctgccttcttgaaacattttcactaggcttccaggacatcacattctcctgatttttcttctccctggctactcctttgcaatcttgtttgctggctgtttctcctgtttttcctgacctgacccccagaggctctgttttttttttttttttttttagatggagcctcgctctgcacccaggctggagtgcaggcatgatctcggctca

SEQ ID NO: 1942 - DNA, 601 bp, Human
cataaaatgtttactgtcccactctcaaagatgaatctttcacaccttctctgaggctaaaactgccatcgttccccattcctgactctctcttagctgatgaccttgcttcatatttcactgaggacataaacatatcctaaagagatcactatctctctccctctgtctctacttgcctcagggctcacacactttgctctccttgtcacttcccaatgctccccttgggcactgaatcccgttgcctcttttgcctatcccatcagtgcctctctctatcccatcgttcccatcagartataaatatcatgtcatatccccacctcccaccattgaaagctctctctatacccctccagctacaccgcatctcctagctccagtgtatagcaaaacctttcagaagagttgtctattttccctgttcccactttttttatcctttgttctttctagaaagtacacaatcaggcttttggttccatcactcctctggacctgtgagcctcacgtgccttcctcctatcactaaaaacctgcttactgccaaatctagtgttggctcccagtcctcctctaacctgacctctcagctgca

SEQ ID NO: 1943 - DNA, 601 bp, Human
tcaagtgatccgcctgctcagcctcccaaagtgctgggattagaggcatgagccaccgtgcctggcacctcactaggatttaaaagaagcccagtgattccgagggctcctgtctaccaccacttctctccaccacaacatcttctcctccacactgctgactccctgggagagcaaatccaagagcgggctatgactagacagagcatccacctcccctagatgactccaggacccaggccattgtttctcatctctatgcatagctcagccaccactgcaagctccaaactctcaggcyacccatcgtcacctgggctccttctacaacctggctgtggatgctccctaacctgaccgagtctgtgtctcttcacacacacactctctgggactcacagtaggtcctcagcattgcctcctgtatccctcagctgcttagctcttagagaaaaacacacaaccctccttcccgctgtactttaatgttatgaccgtaaatctcagataggccttcaggacttcccagtgactctaccaaacttccataaaatgtttactgtcccactctcaaagatgaatctttcacaccttctctgag

SEQ ID NO: 1944 - DNA, 601 bp, Human
gacgacccagcagaagtagtgccatcttctttaagtctctgctctgtcaatggtcatgcatgtagaagcttctcagtgacctctcggcacaatgaactgctatattccttagcacactgtaataatatcattctgagcaccatcctgagcaccatgtaataatatcactctgagcacctatgtcacagacttgcaataattgttgacaatttgtctccttaactagactgtgaggcccttgagggcactgtgttttattcatcttttttattctgtgtagctgagagcctggtgcttattrcatagccagtacattcttggaggaaatcatctcttactcaattggtgtcaggaagaaattgagagccacagactggcaggttcagggatcctttgcactactgagcagctactcagaccctgtgaactgtatgttccctacttccctcctgtcatatcatttttcttttttttttttttttagacagaatctcgctctgtcacccaggctggagtgcagtggtgtgactcagctcactgcaacctctgtctcccgggttcaagcgattctccagcctcagcctaccaggtagctggtatt

SEQ ID NO: 1945 - DNA, 601 bp, Human
cagattcctcccaacagtcatgctattcaatgcagcaagcaacccagccttagtggagagaagcttgggaaaagggaacgtgagacttctcacaatatacaggaaggacctttgcagtcaaatagcctactcacctgattttcctgggtcagtccctattaaacatgggtgtttcacttctcagctgtggatagcacactcatccctgccctggtttcagtttttaatctctttcctctcccgcagcctagtgcagaccgacagcccttttctccaaaacagcacgtcatatttaagaatrtatgtcccttgaatataataatatgatagtatatttattcttctgctcacattttgcatgaaaaacatacttaagacagttaataaaaaaacatataacatctcgttgacgacccagcagaagtagtgccatcttctttaagtctctgctctgtcaatggtcatgcatgtagaagcttctcagtgacctctcggcacaatgaactgctatattccttagcacactgtaataatatcattctgagcaccatcctgagcaccatgtaataatatcactctgagcacctatgtcacagacttg

SEQ ID NO: 1946 - DNA, 601 bp, Human
gctggtctcctgacttgctgtgactgcagaatgaaacagcagtgatgctggaccaggtgtgagcctagctcttcaaaggcctcacagtttctgccttggctttcttgggggagagctgccatgctataagaaggtggtttagaagggaacagaggccaccaagactcacagccagcttcaattgccaggcaagctgggtgctgacgtacttttgaccatagaatcatgagacatagatggctgctgctttaagccactaccttttgggatggtctgtggtgtagtaagagtaactgaaacrctggcttcttatcttaaaataaattctagccaggtgtggtgactcatgcctctaatctcaatgttttgggaggctaaagaaaaaggattgcttgaggtcaggagctcaagaccagcctggacaacacagcaagatcccatttctataaaaataaaatataaaaattagccaggcatggtggtgcatgcctgtagtcccagctactcagaaggctgaggtgggagaatcacttgagttcgaggccgcagtgagctatgattaccactgaactccagtctgggtgaaagaatgagatcctgt

SEQ ID NO: 1947 - DNA, 601 bp, Human
atgtggcagctcacggaaataagttttttaaatggcacggtagaaggattgcacttggcaggatacagctccccttgtcctgcataaaggtctcccaactggtctatccacaatcttgttttcactaagcctttgataatcttgaaatgctgtataaactctatcatgtcattcctgctcatctttggataaaaacacaaacttgtataatggctataaagccttgtttagtctggttcttccctttccagcttcactggacaccagttatctcttggcctcttgtttctggccacagtgrccttctagaaagtcattatggacattaagccagccccactaaagtcttcgcacgttctcttccctccctccccatttttgcctttaaacacctactcattcaatagatctggacttaatagtcaagccctccttcccagaaagacctttctaccctcccagtccaggaccacccttagccacaggacatattttcaaggcaccatttatgttcccttcattgctctgtacacggttttcgataacttagtgtggctatctgattaatgtctatctccttctggagattagaagcctgcag

SEQ ID NO: 1948 - DNA, 601 bp, Human
tggcaacccaggatttgtgataaataagtaattatttatcttcaatgtataaaatgagcttaccgataaaaaaaaaaagacagaaaaactgctgtataaaaagtggccaaaaagcacagataggaaatttcacaagaggagaaatataagtgatggataaaaatataaaaagaaatgttcaaataagaacacatgacacggggaggggaacatcacacactggagcctgttgggggttggggggcaagaggagggagagcattaggacaaatacctaatgcatgccaggcttaaaacctakataatgggttgataggtaaagcaaaccacaatggcacatgtacacctatgtaacaaacctgcatattctgcacttgtatcccagaacttaaagaaaaaaataagaaaagaaaagaaacattcaaatagcgaagaaatagaaaacataaaaatgaaaagccactaggcaagtgtcaaactggcaaaccaaatagcagggctaaaatacagtaaacttgttagacaaagaaaatgccttagaaaactgtcctcatatccaccatgaaaccatgaggtgacagaacacagcaatgactttgtt

SEQ ID NO: 1949 - DNA, 601 bp, Human
attattggatttgaatgagtttattaaatttaactaaaagtgtgtgtgcatgcatgtgtgtgtgtgtgtgcatgtgagtgcatgcatatgtgtatttccatggaagtttgtagaaaagatcacatccgtttttggaaaataagctacatcttcttggcacatttgcatatagtgtgagaagactggcaacccaggatttgtgataaataagtaattatttatcttcaatgtataaaatgagcttaccgataaaaaaaaaaagacagaaaaactgctgtataaaaagtggccaaaaagcacmgataggaaatttcacaagaggagaaatataagtgatggataaaaatataaaaagaaatgttcaaataagaacacatgacacggggaggggaacatcacacactggagcctgttgggggttggggggcaagaggagggagagcattaggacaaatacctaatgcatgccaggcttaaaacctagataatgggttgataggtaaagcaaaccacaatggcacatgtacacctatgtaacaaacctgcatattctgcacttgtatcccagaacttaaagaaaaaaataagaaaagaaaagaaa

SEQ ID NO: 1950 - DNA, 601 bp, Human
tctctcaacaagagtggtaggaatgcctgaagattggctgggcacggtggtgcatgtctgtagttccaactactcaggaggctgagaagagaggatcacttgaacccagggttctaggctgcagtgagccatgattgtgccacttcactccagcctgggtgacacagcaagaccatgtctggaacaaaaaaatgcctgaagttaaagcggggcgggcggggggggcaggcagaggtgctttctcccattctccattctgggtatagtcagtcctttccatgagagccaccatacctgttartgtggcagccagtgtggtggggtagagagtgtggtgtggaaggaacccaccaggctctctgtgccctgagactgggatggaaacattgttgagaatttggtgcaggaggttgtcaaagttgttcacagggctgcagggacaaagtgactccctggccaacagcaacagagccagtgtcactggagccaggaaacaatggagtcatagtcaaaccctctctgactactatgacatttgtaagcccctaggcgtggtcagtatcttagagggcagatctgaaaggccctgtgctgtggtctg

SEQ ID NO: 1951 - DNA, 601 bp, Human
tagtggaaagaggcagttggcatttgttctgagccctctctctcaacaagagtggtaggaatgcctgaagattggctgggcacggtggtgcatgtctgtagttccaactactcaggaggctgagaagagaggatcacttgaacccagggttctaggctgcagtgagccatgattgtgccacttcactccagcctgggtgacacagcaagaccatgtctggaacaaaaaaatgcctgaagttaaagcggggcgggcggggggggcaggcagaggtgctttctcccattctccattctgggtrtagtcagtcctttccatgagagccaccatacctgttagtgtggcagccagtgtggtggggtagagagtgtggtgtggaaggaacccaccaggctctctgtgccctgagactgggatggaaacattgttgagaatttggtgcaggaggttgtcaaagttgttcacagggctgcagggacaaagtgactccctggccaacagcaacagagccagtgtcactggagccaggaaacaatggagtcatagtcaaaccctctctgactactatgacatttgtaagcccctaggcgtggtcagtatc

SEQ ID NO: 1952 - DNA, 601 bp, Human
cttccctgtcttccctgagggactgtgagaaaggtggggaagaaggtagtggaaagaggcagttggcatttgttctgagccctctctctcaacaagagtggtaggaatgcctgaagattggctgggcacggtggtgcatgtctgtagttccaactactcaggaggctgagaagagaggatcacttgaacccagggttctaggctgcagtgagccatgattgtgccacttcactccagcctgggtgacacagcaagaccatgtctggaacaaaaaaatgcctgaagttaaagcggggcgggsggggggggcaggcagaggtgctttctcccattctccattctgggtatagtcagtcctttccatgagagccaccatacctgttagtgtggcagccagtgtggtggggtagagagtgtggtgtggaaggaacccaccaggctctctgtgccctgagactgggatggaaacattgttgagaatttggtgcaggaggttgtcaaagttgttcacagggctgcagggacaaagtgactccctggccaacagcaacagagccagtgtcactggagccaggaaacaatggagtcatagtcaaaccct

SEQ ID NO: 1953 - DNA, 601 bp, Human
gacttccctgtcttccctgagggactgtgagaaaggtggggaagaaggtagtggaaagaggcagttggcatttgttctgagccctctctctcaacaagagtggtaggaatgcctgaagattggctgggcacggtggtgcatgtctgtagttccaactactcaggaggctgagaagagaggatcacttgaacccagggttctaggctgcagtgagccatgattgtgccacttcactccagcctgggtgacacagcaagaccatgtctggaacaaaaaaatgcctgaagttaaagcggggcgtgcggggggggcaggcagaggtgctttctcccattctccattctgggtatagtcagtcctttccatgagagccaccatacctgttagtgtggcagccagtgtggtggggtagagagtgtggtgtggaaggaacccaccaggctctctgtgccctgagactgggatggaaacattgttgagaatttggtgcaggaggttgtcaaagttgttcacagggctgcagggacaaagtgactccctggccaacagcaacagagccagtgtcactggagccaggaaacaatggagtcatagtcaaacc

SEQ ID NO: 1954 - DNA, 601 bp, Human
ctattttattaactaaaagatagaggttttaaagagaagggaaaagaagagtgtgctaaacttctcaccttccatgggcaaaggtgggtggtggagtaacagagagaactgaaggtttaaacatgcttttgaaaaactagaaagttatgtctagtaaaattaaaaacaggagacaagctttccaaaccaccacagaattaaaaagcaaagaaaaaagttacccgttttacgaaagactgaaaatagtgaaaacgaaggaagcatagagccagaaagcatatgataagttgacaaaaatcayaccaaataatctgtcacaataaatgaaaattagttaaatccttattaaggacaaatacccatattagaaacatggattatgagaaatccatttgatgtgaagtacacaagctgctatataaaatggtgaacaaatgtgaataaaaatagattagagattgaaatattatttttttaaatgtgcatatccaggaaaaataattaaatagaacaaaaagtctatctttaaatgaagatattattgatttgatcttttatgcatgaagcaaaaacataaacatatataaagcaaaacttgtta

SEQ ID NO: 1955 - DNA, 601 bp, Human
atataataataaatattttaaactttgtgggccatacagtctctgtagcatctacccaagtccaccactgtcgcatggaagcaccacagacaatatgtcaattacagggcatggccaacctagctggtagaactttactcacaaaagcaggccatgatttgccgacctctgttccatctgggagattaagaaaaatccagagcacaggagtgagtaagtcataatatataataggaggacaattggtaaactaaattatagagagatacaaaagacaggagaggcaatacaaaatttaatraaaataatctagttttaaaatgcactattttattaactaaaagatagaggttttaaagagaagggaaaagaagagtgtgctaaacttctcaccttccatgggcaaaggtgggtggtggagtaacagagagaactgaaggtttaaacatgcttttgaaaaactagaaagttatgtctagtaaaattaaaaacaggagacaagctttccaaaccaccacagaattaaaaagcaaagaaaaaagttacccgttttacgaaagactgaaaatagtgaaaacgaaggaagcatagagccagaaag

SEQ ID NO: 1956 - DNA, 601 bp, Human
ccaggaatcagagcaagtgtacacctttaaaatggtgatgcggaggatgatctctaaattgtattcaaacaagacttaagcagctattaggctcacaaaacaagtgtagggggtgacgaagatggacagtgtgcccaccatatggagtgggatggagggaatatggagattgtgtattacaaaaaccaaataagtaaagtggaacatgaacttgagaaattcaaatggaaatttaaaaaaaaatagtaaaaaagtgactaatgagagagaaatgcaaaaacaaaaaacaaaaaacaaaaacaaaacagggcaggtataggaattgaaattccaagaggaagatcagagcagaggacatcatcattaaaggaggctgcctttggctttagagcaaaaggtgcactggatctcaagcaatagcaatgaaaagttaccccaaacagaagtccccagtatatatactttttaatttaatagagaaaaaaattttataaacatcttagttgaaaaataaatacacaaagagagtacttgacaaaaaaacaataatcaaggggacctcacgtcatttatgaagcattaaatgccaagaaacaaagaa

SEQ ID NO: 1957 - DNA, 601 bp, Human
ttgaagaaaaagagaaaaagtactgttcctatgaaaagcttcagctattcaatagaggagattgatcccaggaatcagagcaagtgtacacctttaaaatggtgatgcggaggatgatctctaaattgtattcaaacaagacttaagcagctattaggctcacaaaacaagtgtagggggtgacgaagatggacagtgtgcccaccatatggagtgggatggagggaatatggagattgtgtattacaaaaaccaaataagtaaagtggaacatgaacttgagaaattcaaatggaaattwaaaaaaaaatagtaaaaaagtgactaatgagagagaaatgcaaaaacaaaaaacaaaaaacaaaaaaaaaacagggcaggtataggaattgaaattccaagaggaagatcagagcagaggacatcatcattaaaggaggctgcctttggctttagagcaaaaggtgcactggatctcaagcaatagcaatgaaaagttaccccaaacagaagtccccagtatatatactttttaatttaatagagaaaaaaattttataaacatcttagttgaaaaataaatacacaaagagagtacttg

SEQ ID NO: 1958 - DNA, 601 bp, Human
ccttaatctggatctgaaagatttgaagaggaacctacccagtttcaaacaaagcccatttcaaattttaataccaggtcaccctctatgaggttgaagaaaaagagaaaaagtactgttcctatgaaaagcttcagctattcaatagaggagattgatcccaggaatcagagcaagtgtacacctttaaaatggtgatgcggaggatgatctctaaattgtattcaaacaagacttaagcagctattaggctcacaaaacaagtgtagggggtgacgaagatggacagtgtgcccaccayatggagtgggatggagggaatatggagattgtgtattacaaaaaccaaataagtaaagtggaacatgaacttgagaaattcaaatggaaatttaaaaaaaaatagtaaaaaagtgactaatgagagagaaatgcaaaaacaaaaaacaaaaaacaaaaaaaaaacagggcaggtataggaattgaaattccaagaggaagatcagagcagaggacatcatcattaaaggaggctgcctttggctttagagcaaaaggtgcactggatctcaagcaatagcaatgaaaagttaccccaaac

SEQ ID NO: 1959 - DNA, 601 bp, Human
ataagccagaatctctgagaagtttcttgaaactatagtttggttaggaccagcctgaataaaaaactgatgaatcctcggttcacatcaacaaaagacgggaaagacggaatggctccagtagcttctcaggaatagccccaggggcttgagagagcagaaactgcgacacacacaggatcaaggccagcttgtcaaaggtaaatctcaatgcttacatccaggcaggatgggaaggaccctgaactttcccaggcaaggtcagcagacgaaggaggttctctacaacaggtgcccaggyggtcagtcatgccacccggaggagagggcactacacaccctgcaccaaacagacaagagaaacagcctttgctgtgcaaaatcaaaacatgttacttccatctcttgaaggataaagagttctgtactctggcagattcgaatcacaacaaagacaatccatttccttctccccttaatctggatctgaaagatttgaagaggaacctacccagtttcaaacaaagcccatttcaaattttaataccaggtcaccctctatgaggttgaagaaaaagagaaaaagtactgttcctatgaa

SEQ ID NO: 1960 - DNA, 601 bp, Human
ttccagacggagctgaactctcaggtcctctttctaaattctcaatctatctaaaagaatacacatacaggtgaaattttacctccctgctaaaaaccttagggaaagccaaagttcataagccagaatctctgagaagtttcttgaaactatagtttggttaggaccagcctgaataaaaaactgatgaatcctcggttcacatcaacaaaagacgggaaagacggaatggctccagtagcttctcaggaatagccccaggggcttgagagagcagaaactgcgacacacacaggatcarggccagcttgtcaaaggtaaatctcaatgcttacatccaggcaggatgggaaggaccctgaactttcccaggcaaggtcagcagacgaaggaggttctctacaacaggtgcccaggcggtcagtcatgccacccggaggagagggcactacacaccctgcaccaaacagacaagagaaacagcctttgctgtgcaaaatcaaaacatgttacttccatctcttgaaggataaagagttctgtactctggcagattcgaatcacaacaaagacaatccatttccttctccccttaatctgg

SEQ ID NO: 1961 - DNA, 601 bp, Human
gcctgagctgacaagtctaccgcttgacatcacacacatcctcaggtgtgtgaatggtttcacttcttctttcctaggaaaagagtcattaaactctacacgtttcacacaatcctcttgtgatcacagccacaagggaaagctcagcttactgaactgtgtagggattctgttactgtctcactgcacagttgtcttcctctaactgttgagaatcaaaggctataggaggatgggtctgctttgtcttgaaccacaaacttctgaaggactgaaggagagaatcgcactgcgggtgacycacttctgcttcacactctgatatccccatgaaaaggagcctgcacacaggcagtgaattccagacggagctgaactctcaggtcctctttctaaattctcaatctatctaaaagaatacacatacaggtgaaattttacctccctgctaaaaaccttagggaaagccaaagttcataagccagaatctctgagaagtttcttgaaactatagtttggttaggaccagcctgaataaaaaactgatgaatcctcggttcacatcaacaaaagacgggaaagacggaatggctccagtagc

SEQ ID NO: 1962 - DNA, 601 bp, Human
ggtgaaccctcataatgagattcatgcccttatacaaagaggaaggtaccagagagctctctctctctctctcttcatcaggtgagaatgcagggagaaggcaaccatctgtgacctagcaggagaaccctcaccaagagcctgacaatgctagaaccctgatctcagacttccagcctccagagctctgagaaatcaatgtcagctgcctaagctgcccagtctatacctgcccaggtattccattatggcagcctgagctgacaagtctaccgcttgacatcacacacatcctcaggtstgtgaatggtttcacttcttctttcctaggaaaagagtcattaaactctacacgtttcacacaatcctcttgtgatcacagccacaagggaaagctcagcttactgaactgtgtagggattctgttactgtctcactgcacagttgtcttcctctaactgttgagaatcaaaggctataggaggatgggtctgctttgtcttgaaccacaaacttctgaaggactgaaggagagaatcgcactgcgggtgactcacttctgcttcacactctgatatccccatgaaaaggagcctgcaca

SEQ ID NO: 1963 - DNA, 601 bp, Human
cagccaggcagctcctgcaagatgtcactaatcccttgcgtgcctcagtttccttatctctacatgagcatagcaacctccatcttcctggctacttctgggatttaaattagacacagtaagtgccatgcaagtaccactaatatggatggaaagtttgtgtcctccccaaatccacatgttgaaaccctaaccaccagtgtgatggtgttaggaggtggggcctttgggaggtgattaggactagatgatgtcacgagggtgaaccctcataatgagattcatgcccttatacaaagargaaggtaccagagagctctctctctctctctcttcatcaggtgagaatgcagggagaaggcaaccatctgtgacctagcaggagaaccctcaccaagagcctgacaatgctagaaccctgatctcagacttccagcctccagagctctgagaaatcaatgtcagctgcctaagctgcccagtctatacctgcccaggtattccattatggcagcctgagctgacaagtctaccgcttgacatcacacacatcctcaggtgtgtgaatggtttcacttcttctttcctaggaaaagagtca

SEQ ID NO: 1964 - DNA, 601 bp, Human
caaaccacacttcttcccaaacttcttctgataccatttaatgagtctgggatcagacactgttagcacagagagcaacctgtgctccagatccccctcagcagccgctgccagcaggaagggagggctgagtgttcaggacgcagggttccctggctgcttcaccagcgcagtgctgcctttatccattttatgtcttggatttctgagtgggatttattttgcacaaagagttctgaagctgagaagtttgaaagccactggctcaacccaagcccctctcctacagatgaggacaccrgagtgcagagcaaagggcgggaccacgtgtgattccagggcttttaactgtagacaggcccctttcctctgttacagggaaggcagccaggcagctcctgcaagatgtcactaatcccttgcgtgcctcagtttccttatctctacatgagcatagcaacctccatcttcctggctacttctgggatttaaattagacacagtaagtgccatgcaagtaccactaatatggatggaaagtttgtgtcctccccaaatccacatgttgaaaccctaaccaccagtgtgatggtgttaggag

SEQ ID NO: 1965 - DNA, 601 bp, Human
gtataataataataaataaaaaaaagaaacaaaacaaaagaaaaacactaacaaaaacaaaaacaaacaaaaagaaaaacgtctccagaccttgccaagtgcctcctggaggtcaacatcacccccgattgagaactactaatgtgacctctttaggaaaagtttattatcctgggattttttcctctcctaaagtttctttttaaaaacccatttctgagattgttctttagtaatttccaaatgacagcaaactcatgaaacaaaacaacatgaaaattccaggtaaatgtccaaaacmtttttcattaagaggaactaaactacgcagtccacttgtagacagtaggtttctcactggcaacgaatgccctggcaataagctaaatgtggatagcacataaaaaaagtgaatgtgcaatgttcccttttcaaaccctttttgggcaaagacgactgctctgccagcattccagtataatgacagctcatgtgccctttgtcaaccttgcctccttctcctttgaaaatacaaaccacacttcttcccaaacttcttctgataccatttaatgagtctgggatcagacactgttagcac

SEQ ID NO: 1966 - DNA, 601 bp, Human
cagatttcattctggggtcatgaagtgctttggaactagatagtggtgatagttggataacattgccaatgtattaaatgctacagaattttacaatttaagatggttaaaattgtgaattttacgttatgtgaatttaattacaattaaaacaaagtgagtagacaaatattgcctctttggggacctcaaggcatctggagacctcagggtttgtttggttcatgtgttttgttttgttttgaatcactagctaagatgttggcaacacagtaaacaaaatctgaacaataataataaytgatgtctgctttaaatgtgctgtttctgatgtatttttgtaaatttcaggaattcctgtagcataaaccagagtttgttaatcttggcactattgccattttgggctggttaattctctgttgtgggggctgtcctgtggttgtggaacattcggcagcacccctggtctaacccacacaatgccagcagcatctcccaccccaattgtgacactatgacagaaagagatcttgggccaggcgcagtggctcatgcctgtaatcctagcactttgggaggccgaggtgggtggatcact

SEQ ID NO: 1967 - DNA, 601 bp, Human
tatggtacattcatacaaataaatagtattcagtcatacaaaaggaatgaagtcctgaaacataccataacatggatgaagcttgataacattatgcaaaatgaagaggtatacacaaaaggtcacatatatgatcccattcatatgcagtatcaggaatcagcacatccatacagattgatggctgccaggcacttggggagtggggaatgccgagtgattgctaatgggacccagatttcattctggggtcatgaagtgctttggaactagatagtggtgatagttggataacattgcyaatgtattaaatgctacagaattttacaatttaagatggttaaaattgtgaattttacgttatgtgaatttaattacaattaaaacaaagtgagtagacaaatattgcctctttggggacctcaaggcatctggagacctcagggtttgtttggttcatgtgttttgttttgttttgaatcactagctaagatgttggcaacacagtaaacaaaatctgaacaataataataactgatgtctgctttaaatgtgctgtttctgatgtatttttgtaaatttcaggaattcctgtagcata

SEQ ID NO: 1968 - DNA, 601 bp, Human
ttgcagatcaattatctgaccagggtctggcatccagaatatattaataacccctgcaactcaacaataaaaagacaaataacccaattaaaaaatgggcaaaggatgtgaatagatataactccaaagaagttacatgaatagccaaacatgcatatgaaaagacactcagcattattagtcattagggaaatgcaaagcaacatcactagagatactatttcacacccactaggatggacatcattttaaaaaatgacaagtaatggtgaggatgtagagaaactagagccctcaaacwttgctggtgggtatgtaaactggggcgtttgctgtgaaaaacaatttggcagttccttaattagctaaacgtagaagttccatatggccgagcaattcaactcctaggggtatacctaaaagaactgaaaactggtactcaaacaaaaacttgtacatggatgttcatagcaatgctattcatagtggtcacaaggcagaaataacttaaatgaccctcaatggagcaatagataaataaaatatggtacattcatacaaataaatagtattcagtcatacaaaaggaatgaagtcctga

SEQ ID NO: 1969 - DNA, 601 bp, Human
aaaagtagataaattggatgtcataaaaattaaagacagctgtccaccaaaggatactatcaagaatgtgaaagggcaacccacgaatgaaaatatttgcagatcaattatctgaccagggtctggcatccagaatatattaataacccctgcaactcaacaataaaaagacaaataacccaattaaaaaatgggcaaaggatgtgaatagatataactccaaagaagttacatgaatagccaaacatgcatatgaaaagacactcagcattattagtcattagggaaatgcaaagcaacrtcactagagatactatttcacacccactaggatggacatcattttaaaaaatgacaagtaatggtgaggatgtagagaaactagagccctcaaacattgctggtgggtatgtaaactggggcgtttgctgtgaaaaacaatttggcagttccttaattagctaaacgtagaagttccatatggccgagcaattcaactcctaggggtatacctaaaagaactgaaaactggtactcaaacaaaaacttgtacatggatgttcatagcaatgctattcatagtggtcacaaggcagaaata

SEQ ID NO: 1970 - DNA, 601 bp, Human
cctcatcaacatatagaggaactatggaattaaatgaataatgagtaatgggctaagaatataggattggatgtaccagaatcacagtgcaactgcctcatggaaaagctgggcattttcctcttaagggatgatccagaagggcaaagtttaaaacaaaggaactgattcaagtgcaatattttacattgtgtaaatatctgaaggaattcacaaacggaccacaatggctgcagagacacagtggtaaagtgcttaataaattggcgaacacgtgttgtgccataaatgttagtgcatraagcaagttatgattatttgtttccctttgtgtttttctaatcaaagatttaaaaatcatgggagttttgagcatcatgagataacaagtattgtgatacaggtccaccattccttttccaaaaactttggtattagatgtgttttggaaatcaggatttttcagattttataaaggtcatctggatcatatgttgtatattgtatactactaccagtgggatatgggtcagcaccctacaatcaaacacagaaatatttctgcaacacaacgtgtaaaatataaaatctacaaatggac

SEQ ID NO: 1971 - DNA, 601 bp, Human
atctctcacttcaacacaccttgcgatcactgcagaccggatcttattctaacactgctctgcaatgttgcttccctgcctcaaacccccagtggctccccacttcctctgatttcatggccaaaacctttgtctggttttcaaaaagacacccagaataatatcatccctggtctgggtcaataatattgtcccaccaagtctggataataatattgtcccaccaagtctggttttccatgactctctctctccctctctctctttctacacacacacacacacacacacacacacacaaacacacacaccactcaaggattatctcacaagctcatgaatgtgctgtgttcactcctgtcttggagcttctattggcttttcaaatccgctattggcttttcaaattctacctttcaagacccagttaaagactccttccctctatggaaacttccctaattaagacctgcctggcatatctcccctctggattcctagaccatttataatgagtgttatcttgtcctgatgactattgtttcaagtgtgctatccttttccccagattagacttgaagaaagtggctcttcttcttcc

SEQ ID NO: 1972 - DNA, 601 bp, Human
tttttatttcaatagatatcaagatagacttgcaagcaaatttgtgtatttaaagcatatgatataatgatggactatgcatgctaattattagaaagtaataagggtgctagttaagtggtgcttcacttctctgtgaagaatttttttttttttttttttgagatggagcctcgatctgcgcccaggctggagtgcagtggtgcaatcttggctcattgcaacctccgcctcccgggttcaagtgattctcctgcctcagcctcctaagtagctgggactacaggctcctgccacaacrcccagctcattttttgtgtctttagtagagacggggtttcactgtgttagccaggatggtctcgatctcctgaccttgtgatccacctgcctcggccccccaaagtgctgggattacaggcgtgagccaccatgcccggcctgaagaagttttttgacttcctaaacttcaaactggaaaaccagcctcctctgactgtacctgtacaatgattttggtccttcattgggcttaattacatgctagtctccaccttgaagtcagggtctgttcctgtctggcgcctggtagactctcaat

SEQ ID NO: 1973 - DNA, 601 bp, Human
ccctcaccatgtgactagctctatcctggacaagtcagatattaaacccagtataatgaaaaccaggtctttacattagagatttttatttcaatagatatcaagatagacttgcaagcaaatttgtgtatttaaagcatatgatataatgatggactatgcatgctaattattagaaagtaataagggtgctagttaagtggtgcttcacttctctgtgaagaatttttttttttttttttttgagatggagcctcgatctgcgcccaggctggagtgcagtggtgcaatcttggctcaytgcaacctccgcctcccgggttcaagtgattctcctgcctcagcctcctaagtagctgggactacaggctcctgccacaacgcccagctcattttttgtgtctttagtagagacggggtttcactgtgttagccaggatggtctcgatctcctgaccttgtgatccacctgcctcggccccccaaagtgctgggattacaggcgtgagccaccatgcccggcctgaagaagttttttgacttcctaaacttcaaactggaaaaccagcctcctctgactgtacctgtacaatgattttgg

SEQ ID NO: 1974 - DNA, 601 bp, Human
gccaggagtttgagaccagcccagccaacacagtgaaaccccatctctattaaaaacacaaaaattagccaggtatggtggtgcatgcctataatcctagctacttgggaggctgaggcacaagaatcgcttgagcctgggaggtggaagttgcagtgagccaagatggcaccattgcactccagcctgggtgacagagagagactctgtctcaaaaaaaaaaaaaaagtgtacagtagccattgggctagatagcctgaggcctaaccggtgcccacagtggggatgtgttatagcacarggaaaaaagctttgctttatgagagaattttgcaagggctattctgacacacacctgagtgagctgacatgtttggagaaggctcaatgagtagaagctcagtacctcccatgtatgctcagaatgttcccacttttactgcctttgattcctatctcaatacattactttagtctctaccaaagtaatacggaagacagaattagaattgtcttttagtgattgtatgcagtgcaatgtacaaccaggacaattgtgttgtttttccggcttgagttgctccagttggctgtctatacc

SEQ ID NO: 1975 - DNA, 601 bp, Human
gccaggctgggcatggcaactcacaccggtaatcccagcactttgggaggctgaggagggcagatcacttgaggccaggagtttgagaccagcccagccaacacagtgaaaccccatctctattaaaaacacaaaaattagccaggtatggtggtgcatgcctataatcctagctacttgggaggctgaggcacaagaatcgcttgagcctgggaggtggaagttgcagtgagccaagatggcaccattgcactccagcctgggtgacagagagagactctgtctcaaaaaaaaaaaaaaagtgtacagtagccattgggctagatagcctgaggcctaaccggtgcccacagtggggatgtgttatagcacaaggaaaaaagctttgctttatgagagaattttgcaagggctattctgacacacacctgagtgagctgacatgtttggagaaggctcaatgagtagaagctcagtacctcccatgtatgctcagaatgttcccacttttactgcctttgattcctatctcaatacattactttagtctctaccaaagtaatacggaagacagaattagaattgtcttttagtgattgta

SEQ ID NO: 1976 - DNA, 601 bp, Human
ttggttccagaatccaagggttttggtttgaatctcagctttgccacttcctaactgggtaatgggccctcacctcactctgcctaatagaactgtgattactaaacaaaggtagatatacaatggctagtatataagtgctgagagatatttgtccttgtcaatagaaaaaaaaaaaagcatatagaattcaccttcctctaccaggcatgtgcctggacctcttcaggctttttaaaaaagctttttaaatttatttttgtctgacattgattatgtgggataaaatatctccaggtgmggtgcagagtctatatgaagaagcacagataggaagagaagtagtcacattaaagtcaaattaagagtcctattaaagtctacaatagccaggctgggcatggcaactcacaccggtaatcccagcactttgggaggctgaggagggcagatcacttgaggccaggagtttgagaccagcccagccaacacagtgaaaccccatctctattaaaaacacaaaaattagccaggtatggtggtgcatgcctataatcctagctacttgggaggctgaggcacaagaatcgcttgagcctgg

SEQ ID NO: 1977 - DNA, 601 bp, Human
gcccttggttccagaatccaagggttttggtttgaatctcagctttgccacttcctaactgggtaatgggccctcacctcactctgcctaatagaactgtgattactaaacaaaggtagatatacaatggctagtatataagtgctgagagatatttgtccttgtcaatagaaaaaaaaaaaagcatatagaattcaccttcctctaccaggcatgtgcctggacctcttcaggctttttaaaaaagctttttaaatttatttttgtctgacattgattatgtgggataaaatatctccargtgcggtgcagagtctatatgaagaagcacagataggaagagaagtagtcacattaaagtcaaattaagagtcctattaaagtctacaatagccaggctgggcatggcaactcacaccggtaatcccagcactttgggaggctgaggagggcagatcacttgaggccaggagtttgagaccagcccagccaacacagtgaaaccccatctctattaaaaacacaaaaattagccaggtatggtggtgcatgcctataatcctagctacttgggaggctgaggcacaagaatcgcttgagc

SEQ ID NO: 1978 - DNA, 601 bp, Human
gtggcaagtgaaggggagtgcttaggtcccttcagactgtgtgccagtgaatgcagttccaaagagctgagagaagggcaaacgaccagcccaggaaggcagcatagtacaggggaaagcccttggttccagaatccaagggttttggtttgaatctcagctttgccacttcctaactgggtaatgggccctcacctcactctgcctaatagaactgtgattactaaacaaaggtagatatacaatggctagtatataagtgctgagagatatttgtccttgtcaatagaaaaaaaaaaaagcatatagaattcaccttcctctaccaggcatgtgcctggacctcttcaggctttttaaaaaagctttttaaatttatttttgtctgacattgattatgtgggataaaatatctccaggtgcggtgcagagtctatatgaagaagcacagataggaagagaagtagtcacattaaagtcaaattaagagtcctattaaagtctacaatagccaggctgggcatggcaactcacaccggtaatcccagcactttgggaggctgaggagggcagatcacttgaggccaggagtttgagacca

SEQ ID NO: 1979 - DNA, 601 bp, Human
ttcactaaaaactctcattaaacactttaagaagagacgtgtagcgagttatttaggctacataaaccaaaaccaaagtgatattgttggtctggtagttctttcttaaaactgcaggtaacacatataagagcaaataagtagcgtcttataggccaagtttacaaaaataaactacaaagagatgtgagaaattttaaacaaaatctctgctcattgttcagaaggagattctcttctctgtgctcttcaggaggggccagcagtggtatttgggctgagtggcaagtgaaggggagtscttaggtcccttcagactgtgtgccagtgaatgcagttccaaagagctgagagaagggcaaacgaccagcccaggaaggcagcatagtacaggggaaagcccttggttccagaatccaagggttttggtttgaatctcagctttgccacttcctaactgggtaatgggccctcacctcactctgcctaatagaactgtgattactaaacaaaggtagatatacaatggctagtatataagtgctgagagatatttgtccttgtcaatagaaaaaaaaaaaagcatatagaattcaccttc

SEQ ID NO: 1980 - DNA, 601 bp, Human
aatggagctactgatgactgactcagtgagtctaatcccatgaccctgactgacaaagcattgtaaatgctaatcctgcaaaagtcccttctactgttatctacaccttgaagagaaaacccaccaaactgaacaatgatgatgttcttacacagcagcgctgcattaggaagaaaatttcaaataatccatcacctagtgtgaatatttccacaaaacagcaaatttcactaaaaactctcattaaacactttaagaagagacgtgtagcgagttatttaggctacataaaccaaaaccmaagtgatattgttggtctggtagttctttcttaaaactgcaggtaacacatataagagcaaataagtagcgtcttataggccaagtttacaaaaataaactacaaagagatgtgagaaattttaaacaaaatctctgctcattgttcagaaggagattctcttctctgtgctcttcaggaggggccagcagtggtatttgggctgagtggcaagtgaaggggagtgcttaggtcccttcagactgtgtgccagtgaatgcagttccaaagagctgagagaagggcaaacgaccagcccag

SEQ ID NO: 1981 - DNA, 601 bp, Human
gtttttacaaacccaatttctcacatagtgtattagtctgttctcaaactgctagaaggacatacccaagactgggtaatttataaaggaaagaggtttaattgactcatagttccgtagagctggggaggcctcaggaaacttacagttatgctgaaaggggaagcaaacacatccttcttcacagcgcagcaggagagagaagaatgagggccaagcgaagggagaagccccttataaaaccatcagatcttgtgagaacttactatcacgagaatagcatgggggaaactgcccccaygattcaattaccttccacttgtccctcccacgacacatgggaattatgggaactacaattcaaggtgagatttgggtggggatatactcaaactatgtcaggtaggaaatgcaattcctcatagagatattcagtgacatggtcaaaggggttactgacaaagctggaatgcaccctggaatgccctccctgattcattattttttgttatttccacttctttccccctgcttttccaaagcatttttattcatagttaagtcatgattcagggccccagggtgaggatcaccatgtacc

SEQ ID NO: 1982 - DNA, 601 bp, Human
agtcattggatgttggctgcctgcaggaagaaggagactctcatttgcagtgggcagccaccaggagtgagacacagttgggagctgccaggcattggccctcccagcaccatagggaagggacacagaaggcacactgcagcgcccattgcacgggtgcacgatcacatgtatgtatattagtaaagttatagatatacgtgtgtgtggaaatcgataaaggatgagagtaggcagaagaaaagagggtctctgattctcagagtataaaatttatttctaacactggtgagtctgaagmctcactggaccccattccagtgggaaacagacaagactctcagcctgggcagttacagcagtgacactggccggatgatttcccttgacctcgccacatggaagccatgcaacccagccccccatcgtcttagctcctgagaactctgactgccttctatttttgaatgggttgggaatagaaccaagagataaattttgtctcccttttgcttgtcagggttgggtaccttgaatatgggttcaaactggaaccaaaaataaaattcaaagtaaacacctcagaaggacacccagctat

SEQ ID NO: 1983 - DNA, 601 bp, Human
aggatgtgccctccttgtcacacctgtgggggagggaggcaagcaggatggggtggaaggagaagctgggctgccatgcagtcaggacaaaagcctcagcccatcccggggaaggcagcattgctctggacagctgcccagtcattggatgttggctgcctgcaggaagaaggagactctcatttgcagtgggcagccaccaggagtgagacacagttgggagctgccaggcattggccctcccagcaccatagggaagggacacagaaggcacactgcagcgcccattgcacgggtgcaygatcacatgtatgtatattagtaaagttatagatatacgtgtgtgtggaaatcgataaaggatgagagtaggcagaagaaaagagggtctctgattctcagagtataaaatttatttctaacactggtgagtctgaagcctcactggaccccattccagtgggaaacagacaagactctcagcctgggcagttacagcagtgacactggccggatgatttcccttgacctcgccacatggaagccatgcaacccagccccccatcgtcttagctcctgagaactctgactgccttctatt

SEQ ID NO: 1984 - DNA, 601 bp, Human
ctgttacttcctggactttgggggactgaggtcttttatagttaaagaaatatacttaggagattggcctggttggggctctgccatcacagtctctggagctgtaacctaatcacatatccttggcagcaaaggcaagatcccctgctgacttgtcaaactctcatatggatgttaagaagattaagataatagcatgcctaacatagctaataagagagatttaaaacaattggcagaaacagattgagttatgaaatgcttattatggatgattctgtgtcacaaaaacagcatatarggtcagcttaatttcacacacaagtaaggggagaagagatgccaatgatgacgaggcagagagagagagagaaggagagagagaaagagagagagcctgctatgccatggccagtgctcaagtgggcagactgatactgagctctgctgggattgcccagtaccaaccccctgcccacaccccaccactgatcatggccagtttggaaagggtgtagaggtcacggaagtgtcaggtcacacccaatgtcctagacactggaggaggtacatctgtgtccaaatatcctaaatagatttt

SEQ ID NO: 1985 - DNA, 601 bp, Human
agcgctctgcccttgtgacctactcacttcccaaaggtctcacttcctagtactattacattggtgattaggtttcaacatacaaatttggggaggggtggacacaaacattcagatcatagcactgagactctgtcttcttacttgtttttattttactttattttattattatttttttgagacagggtctcactctttcacccaggctggggtgcagtggcgtgatcatggctcactgccccctcaactttctgggctccagcaaccctcccacctcaacctcctgagtagctgggascacaggcatgtgccaccatgcctggataatttttatatttttggtagagacagggttttaccatgctgcccaggctggtctcaaactcctgagctcaagcgatctacctacctgggcctcccagggtgctaagattacaggtatgagccactgcacctggcctttcttatttgtaaaatcagataataataccacttacttcacaagtattaagaaactgttcttggagtgcttgacaccagtctgccttttcttttttttcttttgtcgagaataaagatgactgtctaaacaaatacc

SEQ ID NO: 1986 - DNA, 601 bp, Human
cactttctggttcatagaaggctccttctatccgtgtcctcacaaggtggaagggacaagacagcgctctggggtttttctttcttttctttcttttttttttcttttttagcaacaagaatgctcaatttatttattttttcttagcaacaggaatgcccagtcttgggctttttccataaagacacgaatcccaaacatcagcgctctgcccttgtgacctactcacttcccaaaggtctcacttcctagtactattacattggtgattaggtttcaacatacaaatttggggaggggwggacacaaacattcagatcatagcactgagactctgtcttcttacttgtttttattttactttattttattattatttttttgagacagggtctcactctttcacccaggctggggtgcagtggcgtgatcatggctcactgccccctcaactttctgggctccagcaaccctcccacctcaacctcctgagtagctgggaccacaggcatgtgccaccatgcctggataatttttatatttttggtagagacagggttttaccatgctgcccaggctggtctcaaactcctgagctcaa

SEQ ID NO: 1987 - DNA, 601 bp, Human
catatttctgatagttctagatgccaggaagtccaagatccaggtaccagcagttgcggtgtctggtgaggtccactttctggttcatagaaggctccttctatccgtgtcctcacaaggtggaagggacaagacagcgctctggggtttttctttcttttctttcttttttttttcttttttagcaacaagaatgctcaatttatttattttttcttagcaacaggaatgcccagtcttgggctttttccataaagacacgaatcccaaacatcagcgctctgcccttgtgacctactcwcttcccaaaggtctcacttcctagtactattacattggtgattaggtttcaacatacaaatttggggaggggtggacacaaacattcagatcatagcactgagactctgtcttcttacttgtttttattttactttattttattattatttttttgagacagggtctcactctttcacccaggctggggtgcagtggcgtgatcatggctcactgccccctcaactttctgggctccagcaaccctcccacctcaacctcctgagtagctgggaccacaggcatgtgccaccatgcctgg

SEQ ID NO: 1988 - DNA, 601 bp, Human
tctaaaaactgccacaagatgataacatagctataatcataatgtctcattgcagccaaaacttgtttatgggaaatgttgaggttgaatggaaatgttaaagacagatgtggatttaaatctcagctttgccacttgccagcttagtgacatgtgatacttacttaatttctctgagtgtcttagtctgtttgggctgctataacaagatgtcctaaactagctggcatataaaaaacagaaacatatttctgatagttctagatgccaggaagtccaagatccaggtaccagcagttgyggtgtctggtgaggtccactttctggttcatagaaggctccttctatccgtgtcctcacaaggtggaagggacaagacagcgctctggggtttttctttcttttctttcttttttttttcttttttagcaacaagaatgctcaatttatttattttttcttagcaacaggaatgcccagtcttgggctttttccataaagacacgaatcccaaacatcagcgctctgcccttgtgacctactcacttcccaaaggtctcacttcctagtactattacattggtgattaggtttcaacata

SEQ ID NO: 1989 - DNA, 601 bp, Human
ggtctcccagtctgattcctgaatttgaccagtaggagagctatctgccaaccagaaacaccgagttcccaactggaaatagattcaagagataatctcataagacctcagtcaattactatagcattcttcatttcactatcttaggaaaaatgaaaaaacttacagttacacagtctgagggaggacacagctatgtatgattgtgcccgttctgcaaatcactaaccctcagtttcctcatctgtaaaatggagggcaagaactgaatctccctcatggtactgcgtgaagaagaaawtagatgattcatgcaatgtgcttaaaatagtatctggcatgttgtaagcactaaataaaggttaacctttttattattatgacaatacaacaatgattcatatttatgaaatacttgcgtttttctaaaaactgccacaagatgataacatagctataatcataatgtctcattgcagccaaaacttgtttatgggaaatgttgaggttgaatggaaatgttaaagacagatgtggatttaaatctcagctttgccacttgccagcttagtgacatgtgatacttacttaatttctctga

SEQ ID NO: 1990 - DNA, 601 bp, Human
tcttgaactagccggcagatctgcagtgtggaattgagttaccagtggagcaacatgccagcttccttctgacagcgtttggttgttcagaattcaagcatggcataaaacaatgcctgcatgctccagagagacccccagcccccacatgtcccaccctgagcttgctaggccttccagggcctcggtccccacatctgtgttgggagagaggagacagttccttctttagggaatgggggtcatagagatatcttcactctctagcttgttttcttctttctgattgtagctcagctcyttttcttttcttctctcttcttcctgcctttaaccattcttccatgaaacactcaagtgggagagtttggttgtttgacaaaaaatggggagggtgggtagggaggaagatggagtttctttgttttctaattccgccctacttcgtttcctataaggggaccaggaacacttttcactggtcatcgtggggcttctcatcccctaaaggccatattaccccaacttctagttgtcagctatccttgtcaaaatttcctaattttgatacttatatcccacttattcactaatcccagat

SEQ ID NO: 1991 - DNA, 601 bp, Human
aaagaaaagaaaaaacacacacatggccaattaccatagcatcatttcatttcctcagagtgactaatacccagagacagtcacttaaacactaattgcaggagaacaggtagaaatcatgttaaatgagcccatctttattcctggaagaaaagacagcaagactctccaatgcatgagtatgtctgcctcttaatcatctgcagaaagagaaggcagcttccttctctgattgaacattggattttgatggcatcgtagttcttcttgaactagccggcagatctgcagtgtggaattgagttaccagtggagcaacatgccagcttccttctgacagcgtttggttgttcagaattcaagcatggcataaaacaatgcctgcatgctccagagagacccccagcccccacatgtcccaccctgagcttgctaggccttccagggcctcggtccccacatctgtgttgggagagaggagacagttccttctttagggaatgggggtcatagagatatcttcactctctagcttgttttcttctttctgattgtagctcagctccttttcttttcttctctcttcttcctgcctttaacc

SEQ ID NO: 1992 - DNA, 601 bp, Human
tggcaccaggaagcccaccttcctttttcctataagacagaggatcaggactagttggcctaggacccctaccaggaccatcatttcatcactcatacttgacacctcatattcttgcaacttcaagggcacaaccactctctgatgtgtgttataattatagttgtcaaggtgaagaacccgaggtaccataagactatggcttggtcaaaaccccacaatatagtaagacagcggcagaattggaaatgaaatcttcatactccaagcctttctttgggtctttgttccacgctatgtkactctgggctcatttagaagaaagtattgccctgggctggaaaatggagtgcccaatgaatagagctgcttctttctcctccccctgcctcttcttgctcagcccccacacctgctgtactggccactgtctggatgtagtaggagagagaagaaaagcagaacaaaataggtagggggcaaggaaagagaaaggtattagaaaggtaatagaaaggatatataatatttttccatctgttcagaaagaaaggcacttagaacttcagaagagccagcatttttacagaatcacgaacag

SEQ ID NO: 1993 - DNA, 601 bp, Human
cacatagctggagcagaagcaagaaagtggtgggaggaggtgccacacacttttaataaacaaatctcatgacagctcactatcatgatgacagcaccaagggaagatggtgtcaaactatgagaaaccaccctttgagtcagtcacctcccaccaggccccacttccagcattagggattacaatttgacatgagatttgggtggggacacagatccaaaccatatcacaggccaagaaagtttttctctcctttccaactgtgaactgtaattttttgttataggcattaacagaagarcaaacaccagcaagaaatgaacaaaaaatgggggagggcagtgtcatgaagcaaaatatgtggctagcctttctgcaaagtgtgctcttgtctgtgacacatgcttctttggccacatggtatagtgtctgccttccacactgtcacgtgctgggggctgggcatgggcggtgacttccatctgcttcctcatggagcacagcctcacagaattcatcatcaagataggtcatgaatgggaatgcacaccagtgtaatatctttgtccctggtgagccgtatctctgataccttctaaaa

SEQ ID NO: 1994 - DNA, 601 bp, Human
caggatcattgaggaagtgaagcttttcatttactcaattttaagtcacttaaattaaaatagccatacatggctagtggctactatatcagacagcacagatttacattcttacaaaatgaagattacaataatcctcacaaggttgatgcagaatgaagaaaaatgcaaaagaaaactgcatgaaagacattgtagtatacaacctaaggtgctatttatagacaataacttactcaaggatggtttagatacaggctgtattagtctgttctcacattgctacaaaggaatgcctgaractgggtaatttataaagaaaagaagtttaactggctcatggttctgcaggccatgcaggaagcatggtgacttccgcttctggggagatctcaggaaacttacaatcgtggtggaaggtgaaggggaaggaggcacatagctggagcagaagcaagaaagtggtgggaggaggtgccacacacttttaataaacaaatctcatgacagctcactatcatgatgacagcaccaagggaagatggtgtcaaactatgagaaaccaccctttgagtcagtcacctcccaccaggccccactt

SEQ ID NO: 1995 - DNA, 601 bp, Human
aactgagaactcacttttcaccacggagatggtgttaagccattcatgaggaagccaactccctgatccaatcacctcccaccaggccccacctccaacattgggaatcacatttcaacacgagatttggagggggcaaacattcaaaccacattaccaggtttcatccaatggcaacatcttgcaaaactacggtacaatatcacaaccaggatattgacaacgatacagtcaagatacagaatagttccatcctggcaaggagctctcaaatagtccttttatagccatacccacttcycttctgccccaccccgatcttcactcctggaaatcactaatctgttctctatttctataattttgtcatttcaagaatgttatgtaaatagagtcatacagtatgcaatcattttgggattggctttttccacttagcattattctctggtacttcatctagagaatgttgcacatatcaatagcttgctattttttattgctaagtaggggtgtattaccatttgcttaacccttcattcactgatgaatatctggattgtttccagtttggggctattacaaataaagctgctgtaaa

SEQ ID NO: 1996 - DNA, 601 bp, Human
aaacagaaattctggagctgaataatacattaaaaaagaaccaaagagagattctggagctggataatacattaatacctctggaaatgaggtacagagcgtcaacagcagacttgatcaaggagaagaaagaatctgtgaataaaaaggccagtaatttgaagttatccagagaagaaaaagtaaaaaaattaaaataaaaaaagtgaagaaagactccaggatttatgaaatgttatcaggtaaaataatacatgcataatgaagaatttaagaggaaaagagagagagagagaaagcrgcagaaagcttgtttcaagaaagaatggttgaaaactttccaaaacttagaaaggatgtggacatccagacttttgatgttcagacttccaccaaaagatcaactcaaagatgattacacagagacacattataatcaaattattaaaagtcaaagacaaagaggattccaaaagcagcaagagaaaagcaggaaaattccatgaggctatcagtggatttcacaggagaaaccttgctggccaggaggggagtgatatattaaaaatgctgaaagaaaaagactgccaacaaagctgtc

SEQ ID NO: 1997 - DNA, 601 bp, Human
tttttacaaagacaacactatagagaaagaaaactcagtggttgccaaggatgggggtggacagacggtttgactataaacagacatgagaaaatttctgtgggtaatagaacttttctgtcttttttatggtcatggcatgtgactgcagaaatttgactcacagaactggacactacaaagataaattttagtctatataaatgaaatcttaatattaaaaatgaaataatattaagtcaaaaagaattccatggtatgtcactatccaaagacaaccttattaacatttttttgtttrtaaaattttctgaaatcatttttaaaaaactgcacttgctgcttcctacacgtgaacaatagacccagaaaactttacagatgagttttaccaaacattcaaggaattgatggcttaactatctcaaagtataatacataggaaaaggggcaaaattttcctagttcgttttatatgactataaataaaaagaaccaaacagaaattctggagctgaataatacattaaaaaagaaccaaagagagattctggagctggataatacattaatacctctggaaatgaggtacagagcgtca

SEQ ID NO: 1998 - DNA, 601 bp, Human
tatttacaaaccatatatctgataaatgacttgtattcagaatatacaaaaccatcaaacgaagtaataagaaaacagacaattcaataaaaatagaattgaaataaatattgggacacatacttcaccaaaaagataagcaaatgtcaaataagcaaatgaaaagatgctcaacatcattagtctttaggaaaatgaaaactaaagcaacaatgagataccattttacatgtattaggatggctaaaaccaaaacgaaaacaagaacatcctgacaattttgtgtactggattgttcatrtattgcttaaaagaatgcaaaatgatacaaccactttggaaaacagcttggtgatttcttataaagttaaacatacgagccgggcactgtggcccatacctgtaatcccagcactttgggaggacaaggcaggtggatcctttgagttcaggagtttgagaccaggctgggaaacatgaaaaatgctgcctctacaaaaaatacaaaaattagctgggcatggtggcagatgcctgtagacccaaccactagggaggctgacattggaggattgattgagcctgggaggttgaggctgca

SEQ ID NO: 1999 - DNA, 601 bp, Human
gagtcgtccctcttagtgtaggcctgagggcgtggggaggagcagccctacaggatagatgtaaaatcccacctggatctgtctttcctatatttcctttggaacaaaagccttaaattggtgtgggaaggacacaaaccctgtcaccttcaaggaattggagaaaatccactgaaactggggaagggcatgagaaaaaccgtattccatgaaggtgggataaacttgctgggttcagacctattgattgggatcaaagcaaatcactgagggactcctctcctgagacccaaggatgcartgcctgccaaggacagagacttaaccagagcatcagagcccacccatgtgctgcccctggaaccagtgtagcatacattgagtaacaagtaacagtggtctatggctgggagaagggcaaaaacaacaagagaggtgctcatggtgtatgtgtgtgtgtgtgtgtgtgtgtgtgtgtgtgtgtgcatccacattgtgtgcacacgctcatgtgcacacgcctaacacactgaggcagcctgcatggcacccagaccagagcacctgtgcggtcacacaaacactcgagtggacactggct

SEQ ID NO: 2000 - DNA, 601 bp, Human
gacttggagcaggtgaaagatttctctacaagtgacatggacctgccaagccaaaccagtgatcctcaggtcaggccaagctttgtaacttggggcccacagatgtggtttgtttagctagcacaatatttttaaaataatgagttagttgccaagttttaaaattagactgtttcacataaaatttgagtctggctgatcctaacaaaaagagggtgcttatttatttttataaagtttttttcttagctttaaaggagtggttttagtgattactatctcctatggtgaaaaaaaaaaacatacttcctagaattaaatgattcctttctaaaatttttcatttatttatgtttctagagacagggtcttgctctgtcgcccaggctggagtgcagtgatatgatcatagattactccagcttgaaactcctgggtttaagcaatcttcccacctcagcctcctgagtagtagggactgcagaatagctgagacttcaggtgtgagccaccacacctgcctaattttaaaaagtatttgtagagatggggtcttgctatgttgcccaggctggtcttaaactcctggcctcaaggaatc

SEQ ID NO: 2001 - DNA, 601 bp, Human
tttacaggaaacagggatctatctctgtggagaaattttagaagtcagtaaagttcaggagatagtttttgagtgggtaaaactgattttcagtaccagaaaatcataaatgagcatctttcttgtgaagccagttcttaatacatccaaaaaagggagttgcctttttatttttatttatttatttatttatttatttattttctttattattattatttttttgagatggggtctcactctgtcacccaggctggagtgcagtggcgcggtctcggctcactgcaagctccgcctcccrggttcacgccattctcctgcctcagcctcccgagtagctgggattacaggcgcccgccaccacgccaggctaatttttctgtatttttagtagagactggagtttcaccgtgttagccaggatggtctcgatctcctgaccttgtgatccgcccaccttggcctcccaaagtgctgggattacaggcttgagctaccacgcccggcctgcctttttataatacatttaattttttaaaaatgctgataaagacctctagtttgatatataattctcagagttgcgctatcgtctaactac

SEQ ID NO: 2002 - DNA, 601 bp, Human
ttagatggatataacttaagatttgtaaagttccaaatcttcagatatagaacatttccagcacctcagaaggctccctcatgctccctccctataaaggtaacaactattccaatctctgacactacagcttagttcgatctgcttttgaacttgacgtaaatgtcgtcacgtggaacgtactatttgtgcctgactttgtttactcagcattacctctgcgtgattcattcacattgttatatgcatcagtgctttgttcctttttatttatagtaggaatataacacaatttatttasctattccacaggtgatgggcactggaataggtaaatattacaaataaagcagccaaaaacattcttacaaatatctttgggctgatatgtcttttctaaagaaatcaaaatttctaatttaataaattatatgttttctagcttggaagacgaagacaatgagatctaatgaaatgagaggctgagaaaactggacctgattagatgcatccagacgtaatctgtgcaaaaaccatgttttttccatcttcgacattctcatgcctgcttcttcctcctcctctgctcccactcttagca

SEQ ID NO: 2003 - DNA, 601 bp, Human
tttgtgctcctgtgttcaaccagctttggaagtaaattaatagaaaaagatgaaggaactgctttgaatccatacaagacatggtttatcaaacagttcactagcaaacatagatgaaccttgggtgcatttctttatcatcatttttgtgtgaggccctagggtgagaaatagaaatgaaggctggattctgtccatttgggtctcactgtctagctttctttctttttttttttttttttgttgagacggagtctcgctctgtcgcacaggctggagtgcagtggcgcgatctcggctygctgcaagctctgccttccaggctcacgccattctcctgcctcagcctcctgagtagctgggactacaggcgcctgccaccaccctcggagaattttttgtatttttagtggagacggggtttcaccgtgttagccaggatggtctcggtctcctgacctcgtgatccacccacctcggcctcccaaagtgctgggattacaggcgtgagccaccgcgtctggccctcactgtctagctttctaaagacaaactggtatttacaccaatctctccttgtcactgccactaaactccagtc

SEQ ID NO: 2004 - DNA, 601 bp, Human
caaaaaaaaatccaagattcacttcgcatgactttttagtctttcatcatttcccacatttgtgctcctgtgttcaaccagctttggaagtaaattaatagaaaaagatgaaggaactgctttgaatccatacaagacatggtttatcaaacagttcactagcaaacatagatgaaccttgggtgcatttctttatcatcatttttgtgtgaggccctagggtgagaaatagaaatgaaggctggattctgtccatttgggtctcactgtctagctttctttctttttttttttttttttgttgagacggagtctcgctctgtcgcacaggctggagtgcagtggcgcgatctcggctcgctgcaagctctgccttccaggctcacgccattctcctgcctcagcctcctgagtagctgggactacaggcgcctgccaccaccctcggagaattttttgtatttttagtggagacggggtttcaccgtgttagccaggatggtctcggtctcctgacctcgtgatccacccacctcggcctcccaaagtgctgggattacaggcgtgagccaccgcgtctggccctcactgtctagctttc

SEQ ID NO: 2005 - DNA, 601 bp, Human
atcaattacctgacaaaaaaaaatccaagattcacttcgcatgactttttagtctttcatcatttcccacatttgtgctcctgtgttcaaccagctttggaagtaaattaatagaaaaagatgaaggaactgctttgaatccatacaagacatggtttatcaaacagttcactagcaaacatagatgaaccttgggtgcatttctttatcatcatttttgtgtgaggccctagggtgagaaatagaaatgaaggctggattctgtccatttgggtctcactgtctagctttctttcttttyttttttttttttgttgagacggagtctcgctctgtcgcacaggctggagtgcagtggcgcgatctcggctcgctgcaagctctgccttccaggctcacgccattctcctgcctcagcctcctgagtagctgggactacaggcgcctgccaccaccctcggagaattttttgtatttttagtggagacggggtttcaccgtgttagccaggatggtctcggtctcctgacctcgtgatccacccacctcggcctcccaaagtgctgggattacaggcgtgagccaccgcgtctggccctca

SEQ ID NO: 2006 - DNA, 601 bp, Human
ttaaaatatggctagtgatttgattgtaaaatattagctagctcactggagagctggcacaggactttagaggagacctggactcattttttcaggtctcactcttcaacctcagcatgcccactcccatagaatcatatatgaccaacacatctttgttccttggatggcacgtttgcagttattcttaatgagcatgcttcctactcaactgacccgaaatagtttgtaagtaaaataaagagaattgccctaatttcaactatgattaatcaattagttgaaaaatcaattacctgamaaaaaaaaatccaagattcacttcgcatgactttttagtctttcatcatttcccacatttgtgctcctgtgttcaaccagctttggaagtaaattaatagaaaaagatgaaggaactgctttgaatccatacaagacatggtttatcaaacagttcactagcaaacatagatgaaccttgggtgcatttctttatcatcatttttgtgtgaggccctagggtgagaaatagaaatgaaggctggattctgtccatttgggtctcactgtctagctttctttctttttttttttttttttg

SEQ ID NO: 2007 - DNA, 601 bp, Human
ctctggcatggtccagcttaaaatatggctagtgatttgattgtaaaatattagctagctcactggagagctggcacaggactttagaggagacctggactcattttttcaggtctcactcttcaacctcagcatgcccactcccatagaatcatatatgaccaacacatctttgttccttggatggcacgtttgcagttattcttaatgagcatgcttcctactcaactgacccgaaatagtttgtaagtaaaataaagagaattgccctaatttcaactatgattaatcaattagttgwaaaatcaattacctgacaaaaaaaaatccaagattcacttcgcatgactttttagtctttcatcatttcccacatttgtgctcctgtgttcaaccagctttggaagtaaattaatagaaaaagatgaaggaactgctttgaatccatacaagacatggtttatcaaacagttcactagcaaacatagatgaaccttgggtgcatttctttatcatcatttttgtgtgaggccctagggtgagaaatagaaatgaaggctggattctgtccatttgggtctcactgtctagctttctttct

SEQ ID NO: 2008 - DNA, 601 bp, Human
gctctggcatggtccagcttaaaatatggctagtgatttgattgtaaaatattagctagctcactggagagctggcacaggactttagaggagacctggactcattttttcaggtctcactcttcaacctcagcatgcccactcccatagaatcatatatgaccaacacatctttgttccttggatggcacgtttgcagttattcttaatgagcatgcttcctactcaactgacccgaaatagtttgtaagtaaaataaagagaattgccctaatttcaactatgattaatcaattagttraaaaatcaattacctgacaaaaaaaaatccaagattcacttcgcatgactttttagtctttcatcatttcccacatttgtgctcctgtgttcaaccagctttggaagtaaattaatagaaaaagatgaaggaactgctttgaatccatacaagacatggtttatcaaacagttcactagcaaacatagatgaaccttgggtgcatttctttatcatcatttttgtgtgaggccctagggtgagaaatagaaatgaaggctggattctgtccatttgggtctcactgtctagctttctttc

SEQ ID NO: 2009 - DNA, 601 bp, Human
aagttccttgaacaatttggtccttagacttcctagattgttcatggaactttcttcttagattattataccctgttctgtgtctcagtttgcaatttttatcccagcagaggaactctagttctaagagggagatctgcccttgaaaaccggctgcccttattacttcctgcctttcttttaactgagctccactggctcagacacataatttttgttaaccatgaatgctttaataaactcagaggtcgaatcaataaagccaagatttttgaccaattgtggtcaacacaagtaccamagtaaatttttacaaaagggtcaccattcaatttctagtaatttagggcaaattccacgttgggttaatttcatgctgcatttctgaattcccaaagcagtttctacagaatgtcatcatgactatgggttttttcccttgatccgtcctaagacttggtgacaggcaacaagcctgaaacagccattctatttcactggggagagagattgcatgtgtacctggaatgaaaccatctgctagaatcttgcagcagtgtgataatggagaataaaatggagaattgttcaagggtcttag

SEQ ID NO: 2010 - DNA, 601 bp, Human
taactttcatgacttggattatgccattctctctgcctagaatattcttcctctgtctctatgtgttactctgttcaggtactgaaaagccaacagtttccaaggcccagcacctctgagaagttctatctgattaccctgaaaccaccgaggcccaaaagaaagcaacttcctcagtagaggaaatggaaccagaaccctgatttctcagctctcatgagcctagaaagagtagagactctaagatccagaactgcacattctatttcccagtgagccatgacatcctgccttggaggcyagaatgatacttgtcttacaactttattggataatagggaggatcccatggaatgatggaattagtaatcatttataaaagcacaaaatcttataaactgtagtgaagtatgtagtgcatttctattcaattaaataaacatgtattaaactcctacctctactatacactgagcaatgtgctacaaatggaatggtttcttcccacaaagcgctgagtaagagaaagctgtggccttattgaatctattgatttagcctcaataaatgcagaaggatgtcatctactcacacgaagata

SEQ ID NO: 2011 - DNA, 601 bp, Human
ctaaggagggccaccattaattagtgggaagatgtcatgcctcacactggggagtaaatgaaatggcctatagcttagaatggaacctctctaatcgccagagagtccgaggtttctccctaagtctctttactctggcttaaccgagagttcggtcattacataaagctgccacatgcctggaaggaggaaataggaagagcacgtgcagtggctgctgctagaagtggcctcatggaacatcctagaaaaggagaaccagccacaccctcagcttcccagagtgggtggggagggggcyggcatctgtgataatgagagaagatgcctagagggagctggacccaaactctgataagctgggtctttaccaagggccaaagtggcttggctttggctctgttaataatgtcaaacttatgtcgggggtaaagtgctataaaaataaacatgttcactgaacgagcttactaaaattccagtaactcttggcttatcaagtttcttgtatcaagtagaaacgacacaaaaagaagccttgtaatacttttcacagcaagtaactattacccttcataagaatcacaaatctaaccccttt

SEQ ID NO: 2012 - DNA, 601 bp, Human
gcatgctaattctagactaggaatcaaatcctaaaacgtcagttatattgtgtcccactgtgacgaccaagaatggggctctcacctctgcctacctggctcttcacgtgaagtcgccttcctcatttgtccactctcaatttacacctattgcctcagtatggttattaattgtgctttcttacattttgagtgttatgagctagacagtaagttaacattgaattaatatttctggtttggatctacaaggtgggaattattcccactttaaagatgaagcaaatcacttgtctactaygctacaacattgtcttagagaagggagaccaagactctgggtaatacaagactgaatacttactgcgtgtccactctatgcccagtactttcgaaacgctttccatatattagctcatttaattttccaaaaatgctaggaggataccaagacattagtgttattacagattacgaaacaggcatgagaggctaagtaacttgcccaaggccatggaacaagtgagagatggaactggatttgaactctggtaccccagctccagagctggtgggtaataattacttgctatgaaaagta

SEQ ID NO: 2013 - DNA, 601 bp, Human
tattgatacatgtgacatgcatctcaaaatcattatcatgaatgaaagaaaagaggccaagaagattcatactgcatgattttcttcattgtaggagtctagaaattgcaagataatctacagtgatggtaaacagatcagtatttgcctggggacagaatccgtaactccatggattccatgggtgtcagagttgtgctctgacttatctgacatatatcactatttgatggacaaatgatcatataaagtgaaaaatcaacctctaaactaagagtttgggatctaactccagaataayaccagtaacctctgtgtgtctcattggaagaacatatgatgcttcgaggatggttatgtcagagagcaaatgagatggtgtgtgaaaaataatagtaattataagatctgatataaatttaatttattcttattgtttgttattaatagctagagataagcctgaaattataatttcatagctcatcagtgagggcaatgaaggatttgcatcaaaataagcttcggagtcagtctctctctctcacatgcatacacacatacacacatgctcgtatgcatgcacacacacaaacataca

SEQ ID NO: 2014 - DNA, 601 bp, Human
agagcaaaaagatcaaaactggaggaatcacactacctgacttcaaattatactacagagctatggtaaccataacaacatggtaccggcataaaaacagacatacagacaaacaaaactgaatgaagaacccagaaataaattcatacatctacagtgaactcatttttgacaaaggtgccacgaatatacactggggaacgaacactctcgtcagtgaatggtgctggggaaaccagatatccatatgcagaagaattaaaccagacccttatctcttgcaatatacaaaaatcaaatsaaagttgattaaagactatgaaactactaaaacaaaacatcagagaaactctccaggacgttgggctggcatacatttattgagtaatatcccaaagcacaggcaaccaaagcaaaaaaaacggacaaatgggatcacatcaagttaacaagcttttgcacagcaaaggaaacaatctacaaagtgaagacacaatccacagaatgtgagaaaatctttgcaaactgtccatctaaaaagaaactaataaccgaaatttataaggagctcaaacaactcaataagaaaacatacaataat

SEQ ID NO: 2015 - DNA, 601 bp, Human
caatctacagattcagtgcaatccctatcgaaataccaatgaaataaaataaataaaatttatatggaaccacaaaaaaccagaatagccaaaggtatccagagcaaaaagatcaaaactggaggaatcacactacctgacttcaaattatactacagagctatggtaaccataacaacatggtaccggcataaaaacagacatacagacaaacaaaactgaatgaagaacccagaaataaattcatacatctacagtgaactcatttttgacaaaggtgccacgaatatacactggggarcgaacactctcgtcagtgaatggtgctggggaaaccagatatccatatgcagaagaattaaaccagacccttatctcttgcaatatacaaaaatcaaatcaaagttgattaaagactatgaaactactaaaacaaaacatcagagaaactctccaggacgttgggctggcatacatttattgagtaatatcccaaagcacaggcaaccaaagcaaaaaaaacggacaaatgggatcacatcaagttaacaagcttttgcacagcaaaggaaacaatctacaaagtgaagacacaatccac

SEQ ID NO: 2016 - DNA, 601 bp, Human
accaaaacacatgaaaaatcatcaaaaagagacataaaaaaccccaaaacaaaattacaggataatatctctgatgaccattgatgcaaaaaccctcagcaaaacacttgtagtccaaattcaacaacatattaaaaagattattcatcatgaccaactgagattcattctagggatgcaaggatggttcaacatattcatatcaatcagtgtgatacagcatatcaatagaatgaaggacaaaaactgtatgattatttcaattgttgctgaaaaagcatttgataaaattcaacatcgyttcatgataaaaagcctcaaaaaattgggtatagaaagaacatattccaacacaataaaagccatatatgacagacccacagctagtattaaactgaattggaaaaagtgaaagcctttcctctaagttctagaacaagacaagcatgttcactttcactgccgttatttaacatggtactgggagtcctaactagatcaatcagacaagagaaagaaagtaaaggcatccaaattggaaaggaagaagtcaaattatccttgtttgcagatgatataatcttatgtttgaaaaaaatct

SEQ ID NO: 2017 - DNA, 601 bp, Human
aaatacaaaacttagccaggcatgttggcgcatgcctgtaattccagctacttgggaggctgaggcaagagaattgcttgaacctaggaggcagaggttgcagtgagctgagatcgtgccactgcaccctagcctgggttacagagtgagactcggtctcaaaaaaaaagagaaaaaatgatcatcatcaaaacaatattacattagcattaaagacagactaatagatgaatagaagagaacagaaactctaggaacaggccaagatgtgaaaaatgatttttcaaaaacagtataaaartaattcaatggaggaaggtagctcaatgggggaaagtcttttcaacaaatggtgtaagagtaattgaatacctatatgccaaaatgaccatccttgaacctagaagaaatggacatattcccagacacatacaacctaccaagactgaatcaataagcaatcaaaaatctgaatagaccaataacaagtaataatatcaaagccataataaaaagtttcctagcaaagaaaatcctggaacccaatcaatggttttattgctgaattctaccaaatattcaaagaagaactaatacgaat

SEQ ID NO: 2018 - DNA, 601 bp, Human
caatttacatggaaatgcacgtaatctagaattgccaattcaatgtgaaaaaaataaagttggaggagttatgttacttgacttcatgatgtattaaaaagattatcatctgctgggcttggtagctcatgcctgtaatcccagcactgtgggaggctgaggattgtggatcacttgaggtcaggagtttgagaccagcctgatcatcattgtgaaaccctgtctctactaaaaatacaaaacttagccaggcatgttggcgcatgcctgtaattccagctacttgggaggctgaggcaaragaattgcttgaacctaggaggcagaggttgcagtgagctgagatcgtgccactgcaccctagcctgggttacagagtgagactcggtctcaaaaaaaaagagaaaaaatgatcatcatcaaaacaatattacattagcattaaagacagactaatagatgaatagaagagaacagaaactctaggaacaggccaagatgtgaaaaatgatttttcaaaaacagtataaaaataattcaatggaggaaggtagctcaatgggggaaagtcttttcaacaaatggtgtaagagtaattgaa

SEQ ID NO: 2019 - DNA, 601 bp, Human
atctaagatatacttttctggggtctcagctgatcccagattatggaacaagctctctactgtagcttgtttcaccttcaatgtgtcatgtatgacatctggagtctctgttgagtttgcagctctctgggacaataagtgaatattttagactgtatgccagtaaattaaacaaactaaatgaattgaacaaatttcttgaggtacacaaattttcaaaagtgatttaagaagaaagaacatttgaataaatcaatttacatggaaatgcacgtaatctagaattgccaattcaatgtgraaaaaataaagttggaggagttatgttacttgacttcatgatgtattaaaaagattatcatctgctgggcttggtagctcatgcctgtaatcccagcactgtgggaggctgaggattgtggatcacttgaggtcaggagtttgagaccagcctgatcatcattgtgaaaccctgtctctactaaaaatacaaaacttagccaggcatgttggcgcatgcctgtaattccagctacttgggaggctgaggcaagagaattgcttgaacctaggaggcagaggttgcagtgagctgagatcg

SEQ ID NO: 2020 - DNA, 601 bp, Human
tgctcccacgagtactaccattttcctctatagtattaccaacatctctgatgtatgacagtttgttacatttctttcttttttctctctctgcccagggatatcttgcagagcaggtattttgctttattcccatttgatttccaacaatcccttacatggtacattctatctagcaagtttcaataatggatgttgaatttaatgaactaaaaaagccccggatgttgtcaagattgcatttgtttatttaatgtatatagttgttcaaaagttcattaatggggtccagttatgacayagtaatgggtatgatatactcttctgctgtaaaaaaaaagatgtaattgattacaatatatgaagtccttgtttttaagcatttaggattttgatcctctggagaagtaaacacatgagatgagctcaatgttactctttctccttcagggcattttctaaattgtggcacagagaagttgtgccctaatgaaactgatctctgggtggagaaaacagaggttgtcacccagggaaactgagatgggtgaaatttgcaaggcaaggtgccacagaggagagagctgtgcagtgacttcca

SEQ ID NO: 2021 - DNA, 601 bp, Human
ttagagaatatactaaagtttacaaaaagaggattttgggggttatgtaggttaccattattaaatacccaaataagattatttctataagaaacactttaaaacaccactcacctaccaccatccccatgacaaaattaaacactctccttgtgctcccacgagtactaccattttcctctatagtattaccaacatctctgatgtatgacagtttgttacatttctttcttttttctctctctgcccagggatatcttgcagagcaggtattttgctttattcccatttgatttccaayaatcccttacatggtacattctatctagcaagtttcaataatggatgttgaatttaatgaactaaaaaagccccggatgttgtcaagattgcatttgtttatttaatgtatatagttgttcaaaagttcattaatggggtccagttatgacatagtaatgggtatgatatactcttctgctgtaaaaaaaaagatgtaattgattacaatatatgaagtccttgtttttaagcatttaggattttgatcctctggagaagtaaacacatgagatgagctcaatgttactctttctccttc

SEQ ID NO: 2022 - DNA, 601 bp, Human
ttcaaaggacatttttttattcctaaattatttccccagacagagatgataattcagtatcttgatgttcatttaatgcatgtgcatgggaagccaagtcatttgactatcaggagtctagtgaaaaatagaactagaatggtatctgcctgtgaaaaagacacaaagtttagagaatatactaaagtttacaaaaagaggattttgggggttatgtaggttaccattattaaatacccaaataagattatttctataagaaacactttaaaacaccactcacctaccaccatccccatgmcaaaattaaacactctccttgtgctcccacgagtactaccattttcctctatagtattaccaacatctctgatgtatgacagtttgttacatttctttcttttttctctctctgcccagggatatcttgcagagcaggtattttgctttattcccatttgatttccaacaatcccttacatggtacattctatctagcaagtttcaataatggatgttgaatttaatgaactaaaaaagccccggatgttgtcaagattgcatttgtttatttaatgtatatagttgttcaaaagttcat

SEQ ID NO: 2023 - DNA, 601 bp, Human
ctttaatgtcctatataattttaagagtgtagaggggtcttaagaccaacaggtctgggaattcctacatttgagtgtttattgaggctatggagaagggggattcaagaggaattgcaaaggaaaagtgatcatgacatggtgtttacgtcagtacataattgttaagtgctcataaagtccaaggtcttaaacatgaagtagaaggacacaaggtgtcttcaggtggtcaaggtggaggtctgtttgattcagatacaaattctcatctgcatcgacagtaagttagtcttttttttttgggatggaatctcacttgtcacccaggctggagttcagtggcaccatctctgctcactgcaacctccgcctcccaggctcaagtgattctcctgcctcagcctcctgagtagctgggattacaggtgcttgccaccacacctatctactttttgtatttttagtagagacagggttttgccatgttggcaaggctggtcttgaactcctgacctcaagtgatcctcccacctcagcctgccaaagtgctgggattacaagtgtgagccactgtacctggctagtcttgaataacttctag

SEQ ID NO: 2024 - DNA, 601 bp, Human
aaagtgctgagattacaggtgtgagccatcatgcctgacctattattgttattttaaagaaattaatatattttttaaatttctcagttttaattttgaatattgtaaatatcaacagagtctacatacacaaaaactctttaatgtcctatataattttaagagtgtagaggggtcttaagaccaacaggtctgggaattcctacatttgagtgtttattgaggctatggagaagggggattcaagaggaattgcaaaggaaaagtgatcatgacatggtgtttacgtcagtacataatygttaagtgctcataaagtccaaggtcttaaacatgaagtagaaggacacaaggtgtcttcaggtggtcaaggtggaggtctgtttgattcagatacaaattctcatctgcatcgacagtaagttagtcttttttttttgggatggaatctcacttgtcacccaggctggagttcagtggcaccatctctgctcactgcaacctccgcctcccaggctcaagtgattctcctgcctcagcctcctgagtagctgggattacaggtgcttgccaccacacctatctactttttgtattttta

SEQ ID NO: 2025 - DNA, 601 bp, Human
tgggcacaaactcctgaactcaagtgatcctccagcgttggcgtcccaaagtgctgagattacaggtgtgagccatcatgcctgacctattattgttattttaaagaaattaatatattttttaaatttctcagttttaattttgaatattgtaaatatcaacagagtctacatacacaaaaactctttaatgtcctatataattttaagagtgtagaggggtcttaagaccaacaggtctgggaattcctacatttgagtgtttattgaggctatggagaagggggattcaagaggaatwgcaaaggaaaagtgatcatgacatggtgtttacgtcagtacataattgttaagtgctcataaagtccaaggtcttaaacatgaagtagaaggacacaaggtgtcttcaggtggtcaaggtggaggtctgtttgattcagatacaaattctcatctgcatcgacagtaagttagtcttttttttttgggatggaatctcacttgtcacccaggctggagttcagtggcaccatctctgctcactgcaacctccgcctcccaggctcaagtgattctcctgcctcagcctcctgagtagctg

SEQ ID NO: 2026 - DNA, 601 bp, Human
tatttgcctttgccactatcattctgttgtgagagtggagtgaaatgtttcagagatgaaatgatgtgtgttattgtaacagattaaatgaagagcagatatgaggatttagctatcatttatagcctgacatcaaagacacttgcaaaaatgtagaacaatattaccccctcactgttttaaatttggaaaatccagtttgttttaacaaaagtatgttatttatgttaatatgtaatgggtttattatttttattttattttattttatttatatttaaaacagcgtctcgctctgtcrcccaggctggaatgcagtggtgcgatcacagttcacggtagccttcaactcctgggcttaagcaatccccctgacttagcctcctgaatagctgggactataggcatgagccaccatgcctggctaattttttgattttttttgtgaagatggggtctcattatgttgcctaggctgggcacaaactcctgaactcaagtgatcctccagcgttggcgtcccaaagtgctgagattacaggtgtgagccatcatgcctgacctattattgttattttaaagaaattaatatattttttaa

SEQ ID NO: 2027 - DNA, 601 bp, Human
acagacaccatggggacatatgagacagtggagtggagggtattttaaatgaaggggaatgatgctaaaggagggtcagtgtaaaagtggatagagagatgattaatttcgaaaggggggtacaagatgaagggacacccctgaaatcgggcacaggcacatagatttgataccatgattatcaggcagcctctgtaatgtgtgaccacaggaagcttttgcatatggctttgttttaaaggcagatatgttcaggacatattggagaggtttattccctcactgcgcaaatttttatagrgatgagactggaattgagagtgaaatgaagggagtcgtattagagcatgagttctctcagcgttctcctccaaagggtctgcaaggtgaacaatatgttcacaacgatactaaggcagtatttgcctttgccactatcattctgttgtgagagtggagtgaaatgtttcagagatgaaatgatgtgtgttattgtaacagattaaatgaagagcagatatgaggatttagctatcatttatagcctgacatcaaagacacttgcaaaaatgtagaacaatattaccccctcactgtttta

SEQ ID NO: 2028 - DNA, 601 bp, Human
acgtggccgcagagaacagacaccatggggacatatgagacagtggagtggagggtattttaaatgaaggggaatgatgctaaaggagggtcagtgtaaaagtggatagagagatgattaatttcgaaaggggggtacaagatgaagggacacccctgaaatcgggcacaggcacatagatttgataccatgattatcaggcagcctctgtaatgtgtgaccacaggaagcttttgcatatggctttgttttaaaggcagatatgttcaggacatattggagaggtttattccctcactgmgcaaatttttatagagatgagactggaattgagagtgaaatgaagggagtcgtattagagcatgagttctctcagcgttctcctccaaagggtctgcaaggtgaacaatatgttcacaacgatactaaggcagtatttgcctttgccactatcattctgttgtgagagtggagtgaaatgtttcagagatgaaatgatgtgtgttattgtaacagattaaatgaagagcagatatgaggatttagctatcatttatagcctgacatcaaagacacttgcaaaaatgtagaacaatattac

SEQ ID NO: 2029 - DNA, 601 bp, Human
gcaggttggatttgacctatgagctctagttagctaacatctaaggtaggatttatccctcactttaaagggaattaagaacaaaagtgtttcttctgccctttgattattaagaatattattatgaacaagaaagagatgtctaaaattacaattaatgaacaatgttctagaagattaagtcaatttaatgagagaagaaaagaaagcagatataaataatggaaaaggcaacttattaagacgtgtatcctgtgtactataataatttgttacctggaaaacaaacgttgtatttttwaaaaaatcttttttcctaactttgaattctaaaaaaactaagaaacaatgatcagggcagttgcaatgaatattccattagattgtgtccttcaaacaccatctcctactaaaaaggaccaagacttcctggagaaatggctgattccaggtctgggcaggaaacatacaagaacagacttattgctactggtcaggtggccacaagagactgcagtatcgtgtcaaaagagctaaggaactaacttaaatgaacaaccattggccaatgatgagacaatgtgagactcgataagcattc

SEQ ID NO: 2030 - DNA, 601 bp, Human
catttcaaggattgaagttgttacctgaggtggctctttttgtattcagtgatacaccattagattctgcatcattttcatgcaactttatctgtctcttcattgttgtcagaataaattaagagaaaaagtgaaatttaggaggaaagaagcctgctatctctggtaatagatagtctgtgtggttcttctggcctcagaattgtggttcatgaatcttgcatgaattttgggatacagggccagatagtaaatattttaggccttgctagctgtatggtctctgtttctattattcagytctgccactgtagcttgaatgcaaccatagtcattaggtaaatgaatgtgtgtgactgtgttttaacaaaactttatttgtgaacactaaaatttgaatttcatataattttcctgtgtcacaaaataaattctttgtttgattgttaaaaattatttaaaaatgaaaaaattgtatttaattcatgtggccataccaaaaaaaaggaggcaggttggatttgacctatgagctctagttagctaacatctaaggtaggatttatccctcactttaaagggaattaagaacaaaagtgtt

SEQ ID NO: 2031 - DNA, 601 bp, Human
atgtaaaaatgcttcctaattcactttcaaagctagcataatcttgatctcaaaactgagaaatagagccaaatcaaaagaaaacaaataaaaagtaaatatgaacaacccactgtcaccacaaaacaaacaatcccacagacttgtatcatttagaaatgaagttgaaatacaatgaaagttgtcgattatatctaccagtctattaagtaaaaacaaaccatgatcaagtagggcaggaagtggcaaactttttaagttttattattaaaaacattagggaataatggaataattaacmggaagggaacactttcatttcaaggattgaagttgttacctgaggtggctctttttgtattcagtgatacaccattagattctgcatcattttcatgcaactttatctgtctcttcattgttgtcagaataaattaagagaaaaagtgaaatttaggaggaaagaagcctgctatctctggtaatagatagtctgtgtggttcttctggcctcagaattgtggttcatgaatcttgcatgaattttgggatacagggccagatagtaaatattttaggccttgctagctgtatggtctct

SEQ ID NO: 2032 - DNA, 601 bp, Human
tcattttttgtatttatcaatatttgtattagacctctaaatatatccttgccaggtaagaaaacaggtagaaaagaagaatacatgattaatttgatagatgtagaaagacattaagtagaattcatcaccaattctggataaaatcattttaatgcatatagactggaaggacattctcttagtagcacaaagaagacctgtaagttccatcacaatatttcacaaagaactactaaaaacatagacatttaactcagtactttctcactcatgctttgccttaggttctttatgtagyaaatgtttactttgtaagcatcaaatgaattaatgtagacaggaatatatagatcagtgtctggcacatagtaaggtcatatacgttggtgattattgttattaccactatataacataaacaagtaaaataatgagtttgtaaccattcattaattattgcttacatttttagtacatccatgctcaccctttcatgagtaaaattaagtatgaacatgttcaaatatgtgaattacaaaaataaatgtaaatggattaaagtgctgtgttaaaaaataaagcctctcacactgaatta

SEQ ID NO: 2033 - DNA, 601 bp, Human
agtgactttctctttggaataagtttgatctatattcaggcaccaaaacagtttgaagaaggtcatagcaaccatgtttaaaaattactgtgtcttttaagatacaaaattaatatatgctaaatttttacaatctgtggtatccacaattggtatgcctcccatgcacatataggtgcatgtgtacacacacatacacacactcacacacacacaatacaaaaatcaaccatgatgctacaatctagaaataagaccagattttaaacaactatgattgtatttagagcacatgcttttkaccagcctttatgtaatatgtcatgaacattttgctattttatttttattatagaacacaatttttcatggcatcttagtatttcattgcatgaatataacaaaatttatctacttctgctaatttgaatattttggttatttccagtttcctctattataaataactatgaaataaatatttgtgtggatagatttggagtattttcttaagttacatttctagagaaagaattctgggtcatataatataaatttcataaggtttttgatccgtattgccaaattgctctctggagag

SEQ ID NO: 2034 - DNA, 601 bp, Human
aaaataaattgttaaaaacttcctaacatagaaattatagtgactttctctttggaataagtttgatctatattcaggcaccaaaacagtttgaagaaggtcatagcaaccatgtttaaaaattactgtgtcttttaagatacaaaattaatatatgctaaatttttacaatctgtggtatccacaattggtatgcctcccatgcacatataggtgcatgtgtacacacacatacacacactcacacacacacaatacaaaaatcaaccatgatgctacaatctagaaataagaccagatwttaaacaactatgattgtatttagagcacatgctttttaccagcctttatgtaatatgtcatgaacattttgctattttatttttattatagaacacaatttttcatggcatcttagtatttcattgcatgaatataacaaaatttatctacttctgctaatttgaatattttggttatttccagtttcctctattataaataactatgaaataaatatttgtgtggatagatttggagtattttcttaagttacatttctagagaaagaattctgggtcatataatataaatttcataa

SEQ ID NO: 2035 - DNA, 601 bp, Human
aaaataaaaataaattgttaaaaacttcctaacatagaaattatagtgactttctctttggaataagtttgatctatattcaggcaccaaaacagtttgaagaaggtcatagcaaccatgtttaaaaattactgtgtcttttaagatacaaaattaatatatgctaaatttttacaatctgtggtatccacaattggtatgcctcccatgcacatataggtgcatgtgtacacacacatacacacactcacacacacacaatacaaaaatcaaccatgatgctacaatctagaaataagamcagattttaaacaactatgattgtatttagagcacatgctttttaccagcctttatgtaatatgtcatgaacattttgctattttatttttattatagaacacaatttttcatggcatcttagtatttcattgcatgaatataacaaaatttatctacttctgctaatttgaatattttggttatttccagtttcctctattataaataactatgaaataaatatttgtgtggatagatttggagtattttcttaagttacatttctagagaaagaattctgggtcatataatataaatt

SEQ ID NO: 2036 - DNA, 601 bp, Human
cactatgtgccccataaatataatatgtatggttattttgtgtcaattaaagaaataaaataaaaataaattgttaaaaacttcctaacatagaaattatagtgactttctctttggaataagtttgatctatattcaggcaccaaaacagtttgaagaaggtcatagcaaccatgtttaaaaattactgtgtcttttaagatacaaaattaatatatgctaaatttttacaatctgtggtatccacaattggtatgcctcccatgcacatataggtgcatgtgtacacacacatacacayactcacacacacacaatacaaaaatcaaccatgatgctacaatctagaaataagaccagattttaaacaactatgattgtatttagagcacatgctttttaccagcctttatgtaatatgtcatgaacattttgctattttatttttattatagaacacaatttttcatggcatcttagtatttcattgcatgaatataacaaaatttatctacttctgctaatttgaatattttggttatttccagtttcctctattataaataactatgaaataaatatttgtgtggatagatttgga

SEQ ID NO: 2037 - DNA, 601 bp, Human
gagcctggaggacactgtgttaggtgaaataagccaggaacagaaagataaataccacatgttctcactcatatgcagaagctaaaaaagttggtctcgtagaagcagagattagaatagtggttactgaaggctgggaagaatcgtggggaggggtatagggagagattgggtaaaggatacaaaattacagctagataggaggaataagttctagtgttctatagcactataagatgactatagttaaaaagttgtgatatattgttggatggctagaacagtttgaatgtttccaacwcaaagaaatgatcttataaatgtttgaagtgatggatatgttaatcactctaatttgaccactatacattatatatatcaaaacatcactatgtgccccataaatataatatgtatggttattttgtgtcaattaaagaaataaaataaaaataaattgttaaaaacttcctaacatagaaattatagtgactttctctttggaataagtttgatctatattcaggcaccaaaacagtttgaagaaggtcatagcaaccatgtttaaaaattactgtgtcttttaagatacaaaattaat

SEQ ID NO: 2038 - DNA, 601 bp, Human
gctattcacgatagccaatatatggaatcaacctaagtatttatcaaaagatgaatggataacagaaatgtggtatatatacacaatagaatactactcagccctaaaaaagaatgaaattctgtcatttgtggcaacatggatgagcctggaggacactgtgttaggtgaaataagccaggaacagaaagataaataccacatgttctcactcatatgcagaagctaaaaaagttggtctcgtagaagcagagattagaatagtggttactgaaggctgggaagaatcgtggggaggggkatagggagagattgggtaaaggatacaaaattacagctagataggaggaataagttctagtgttctatagcactataagatgactatagttaaaaagttgtgatatattgttggatggctagaacagtttgaatgtttccaacacaaagaaatgatcttataaatgtttgaagtgatggatatgttaatcactctaatttgaccactatacattatatatatcaaaacatcactatgtgccccataaatataatatgtatggttattttgtgtcaattaaagaaataaaataaaaataaa

SEQ ID NO: 2039 - DNA, 601 bp, Human
tatccatatgcagaagaatgaaacttctaaactcctatctctccccttatataaaaattcaccaaaacagtttcaaaacttaaatgtaagaccaaaaactataaatatactagaagaaaatataagggaaatgcttcaggacattggtctgggaaaaatttaataaacaagacctcaaaagcacaggaaacaaaagcaaaaatagacaaacgggattatatcaaactaaaaaccttctgcacagcaaaggaaacaagctatgcatctgacaacagattaatatccagaatataaacggaayttaaactattaaacagtgaaaaatgtgataatccaattaaaaagggaaaataatctgaacagatatttctcaaaagaagacatacaaatggctaaccaatatataaaaatatcacgaatcatcaggtatatgcaaatccaaaccacaatgagatatcttcttaccccagtaaaaatgccttcatcaaaaagaaaaaacataacaaatgctggtgaggatgggaagaaaagggaactattatacactgttggtgggaatgtaaactagtacagccattgtaaagaacattatggtggttcc

SEQ ID NO: 2040 - DNA, 601 bp, Human
tttgcagctaactgattttcaacaaagctgccaagaacatacagtggggcaaggatagtatttttgataaatggtgctgggaaaattggatatccatatgcagaagaatgaaacttctaaactcctatctctccccttatataaaaattcaccaaaacagtttcaaaacttaaatgtaagaccaaaaactataaatatactagaagaaaatataagggaaatgcttcaggacattggtctgggaaaaatttaataaacaagacctcaaaagcacaggaaacaaaagcaaaaatagacaaaygggattatatcaaactaaaaaccttctgcacagcaaaggaaacaagctatgcatctgacaacagattaatatccagaatataaacggaatttaaactattaaacagtgaaaaatgtgataatccaattaaaaagggaaaataatctgaacagatatttctcaaaagaagacatacaaatggctaaccaatatataaaaatatcacgaatcatcaggtatatgcaaatccaaaccacaatgagatatcttcttaccccagtaaaaatgccttcatcaaaaagaaaaaacataacaaatgct

SEQ ID NO: 2041 - DNA, 601 bp, Human
cccacatgcattagacctatgtcttaatgcccccattccccttttccccccacccctgacaggcctccaggtgtgatgttcccctaaattgtttttaaaaagggtaaaattcatatggaaccacaaaagaccccaaatggccaaagcaatcctgagcaaaaagaacaaagctagaggcaacacactacatgccttcaaaatatgttgtgaagctacagtgatcaaaacagcatggtactgatgtaaaaatagacacatagaccaatggaatagaatagagaatccagaaatcaatccatgyatttgcagctaactgattttcaacaaagctgccaagaacatacagtggggcaaggatagtatttttgataaatggtgctgggaaaattggatatccatatgcagaagaatgaaacttctaaactcctatctctccccttatataaaaattcaccaaaacagtttcaaaacttaaatgtaagaccaaaaactataaatatactagaagaaaatataagggaaatgcttcaggacattggtctgggaaaaatttaataaacaagacctcaaaagcacaggaaacaaaagcaaaaatagacaa

SEQ ID NO: 2042 - DNA, 601 bp, Human
gaacgtgcacatttgttacacagacatacatgtgcaatggtggcctgctgcatgcaccaacacgtcatccaggttccaagccccacatgcattagacctatgtcttaatgcccccattccccttttccccccacccctgacaggcctccaggtgtgatgttcccctaaattgtttttaaaaagggtaaaattcatatggaaccacaaaagaccccaaatggccaaagcaatcctgagcaaaaagaacaaagctagaggcaacacactacatgccttcaaaatatgttgtgaagctacagtratcaaaacagcatggtactgatgtaaaaatagacacatagaccaatggaatagaatagagaatccagaaatcaatccatgcatttgcagctaactgattttcaacaaagctgccaagaacatacagtggggcaaggatagtatttttgataaatggtgctgggaaaattggatatccatatgcagaagaatgaaacttctaaactcctatctctccccttatataaaaattcaccaaaacagtttcaaaacttaaatgtaagaccaaaaactataaatatactagaagaaaatataaggg

SEQ ID NO: 2043 - DNA, 601 bp, Human
atagtgctgtgtgcttattgccaaattttcactggcaaaatcagatcctgatttagacaacaaaacaaagcaatttgaatcaattattaagaaattttatggttaaaaatatatatttttaaaattttactttaagttctgggatacatgtgcggaacgtgcacatttgttacacagacatacatgtgcaatggtggcctgctgcatgcaccaacacgtcatccaggttccaagccccacatgcattagacctatgtcttaatgcccccattccccttttccccccacccctgacaggccyccaggtgtgatgttcccctaaattgtttttaaaaagggtaaaattcatatggaaccacaaaagaccccaaatggccaaagcaatcctgagcaaaaagaacaaagctagaggcaacacactacatgccttcaaaatatgttgtgaagctacagtgatcaaaacagcatggtactgatgtaaaaatagacacatagaccaatggaatagaatagagaatccagaaatcaatccatgcatttgcagctaactgattttcaacaaagctgccaagaacatacagtggggcaaggatagtatttt

SEQ ID NO: 2044 - DNA, 601 bp, Human
ctgtacctgctaacaccgaatgcgctacaacccactgcctggtttctctactgctgtatagtgctgtgtgcttattgccaaattttcactggcaaaatcagatcctgatttagacaacaaaacaaagcaatttgaatcaattattaagaaattttatggttaaaaatatatatttttaaaattttactttaagttctgggatacatgtgcggaacgtgcacatttgttacacagacatacatgtgcaatggtggcctgctgcatgcaccaacacgtcatccaggttccaagccccacatgyattagacctatgtcttaatgcccccattccccttttccccccacccctgacaggcctccaggtgtgatgttcccctaaattgtttttaaaaagggtaaaattcatatggaaccacaaaagaccccaaatggccaaagcaatcctgagcaaaaagaacaaagctagaggcaacacactacatgccttcaaaatatgttgtgaagctacagtgatcaaaacagcatggtactgatgtaaaaatagacacatagaccaatggaatagaatagagaatccagaaatcaatccatgcatttgcag

SEQ ID NO: 2045 - DNA, 601 bp, Human
gctgggttcaaacccatgcttgcctggctccagaccctgtcctgtacctgctaacaccgaatgcgctacaacccactgcctggtttctctactgctgtatagtgctgtgtgcttattgccaaattttcactggcaaaatcagatcctgatttagacaacaaaacaaagcaatttgaatcaattattaagaaattttatggttaaaaatatatatttttaaaattttactttaagttctgggatacatgtgcggaacgtgcacatttgttacacagacatacatgtgcaatggtggcctgcwgcatgcaccaacacgtcatccaggttccaagccccacatgcattagacctatgtcttaatgcccccattccccttttccccccacccctgacaggcctccaggtgtgatgttcccctaaattgtttttaaaaagggtaaaattcatatggaaccacaaaagaccccaaatggccaaagcaatcctgagcaaaaagaacaaagctagaggcaacacactacatgccttcaaaatatgttgtgaagctacagtgatcaaaacagcatggtactgatgtaaaaatagacacatagaccaatgg

SEQ ID NO: 2046 - DNA, 601 bp, Human
caataagagtgaagctgggttcaaacccatgcttgcctggctccagaccctgtcctgtacctgctaacaccgaatgcgctacaacccactgcctggtttctctactgctgtatagtgctgtgtgcttattgccaaattttcactggcaaaatcagatcctgatttagacaacaaaacaaagcaatttgaatcaattattaagaaattttatggttaaaaatatatatttttaaaattttactttaagttctgggatacatgtgcggaacgtgcacatttgttacacagacatacatgtgcmatggtggcctgctgcatgcaccaacacgtcatccaggttccaagccccacatgcattagacctatgtcttaatgcccccattccccttttccccccacccctgacaggcctccaggtgtgatgttcccctaaattgtttttaaaaagggtaaaattcatatggaaccacaaaagaccccaaatggccaaagcaatcctgagcaaaaagaacaaagctagaggcaacacactacatgccttcaaaatatgttgtgaagctacagtgatcaaaacagcatggtactgatgtaaaaatagaca

SEQ ID NO: 2047 - DNA, 601 bp, Human
gagagttcttcctagcaccatgagggtgatgatggtggcactaataatagtaattataacagtagatgtaatttattagtaatttcaactgtccagcaatgtgctaagtacttttcatgcaccacctcatctcctcatatcaaccatgtaaggtaggcattgtttatccccattttacaaatgaggaaaatgagactcggggagtttaataatttgccaaaaaacaatcagccaataagagtgaagctgggttcaaacccatgcttgcctggctccagaccctgtcctgtacctgctaacwccgaatgcgctacaacccactgcctggtttctctactgctgtatagtgctgtgtgcttattgccaaattttcactggcaaaatcagatcctgatttagacaacaaaacaaagcaatttgaatcaattattaagaaattttatggttaaaaatatatatttttaaaattttactttaagttctgggatacatgtgcggaacgtgcacatttgttacacagacatacatgtgcaatggtggcctgctgcatgcaccaacacgtcatccaggttccaagccccacatgcattagacctatgtc

SEQ ID NO: 2048 - DNA, 601 bp, Human
gagaagtttttaagtttcatgatctcataacccatgtggagagttcttcctagcaccatgagggtgatgatggtggcactaataatagtaattataacagtagatgtaatttattagtaatttcaactgtccagcaatgtgctaagtacttttcatgcaccacctcatctcctcatatcaaccatgtaaggtaggcattgtttatccccattttacaaatgaggaaaatgagactcggggagtttaataatttgccaaaaaacaatcagccaataagagtgaagctgggttcaaacccatrcttgcctggctccagaccctgtcctgtacctgctaacaccgaatgcgctacaacccactgcctggtttctctactgctgtatagtgctgtgtgcttattgccaaattttcactggcaaaatcagatcctgatttagacaacaaaacaaagcaatttgaatcaattattaagaaattttatggttaaaaatatatatttttaaaattttactttaagttctgggatacatgtgcggaacgtgcacatttgttacacagacatacatgtgcaatggtggcctgctgcatgcaccaacacgtc

SEQ ID NO: 2049 - DNA, 601 bp, Human
tttgaaaaagagttagagaagtttttaagtttcatgatctcataacccatgtggagagttcttcctagcaccatgagggtgatgatggtggcactaataatagtaattataacagtagatgtaatttattagtaatttcaactgtccagcaatgtgctaagtacttttcatgcaccacctcatctcctcatatcaaccatgtaaggtaggcattgtttatccccattttacaaatgaggaaaatgagactcggggagtttaataatttgccaaaaaacaatcagccaataagagtgaagcygggttcaaacccatgcttgcctggctccagaccctgtcctgtacctgctaacaccgaatgcgctacaacccactgcctggtttctctactgctgtatagtgctgtgtgcttattgccaaattttcactggcaaaatcagatcctgatttagacaacaaaacaaagcaatttgaatcaattattaagaaattttatggttaaaaatatatatttttaaaattttactttaagttctgggatacatgtgcggaacgtgcacatttgttacacagacatacatgtgcaatggtggcctgctgc

SEQ ID NO: 2050 - DNA, 601 bp, Human
tgtttattacataggatttcttgctggaatttcttccatggatacctgggctttctatcacatctggcactttgtttcttctttttgtcacttttagagaaaaagcctcccagaaattagacataatttttgaaaaagagttagagaagtttttaagtttcatgatctcataacccatgtggagagttcttcctagcaccatgagggtgatgatggtggcactaataatagtaattataacagtagatgtaatttattagtaatttcaactgtccagcaatgtgctaagtacttttcatgmaccacctcatctcctcatatcaaccatgtaaggtaggcattgtttatccccattttacaaatgaggaaaatgagactcggggagtttaataatttgccaaaaaacaatcagccaataagagtgaagctgggttcaaacccatgcttgcctggctccagaccctgtcctgtacctgctaacaccgaatgcgctacaacccactgcctggtttctctactgctgtatagtgctgtgtgcttattgccaaattttcactggcaaaatcagatcctgatttagacaacaaaacaaagcaatttg

SEQ ID NO: 2051 - DNA, 601 bp, Human
aagttgaatctaatcaggtaaataataggtgtgtttctacaagttgtgctaagtctactctagagctgaggccatatgtttattacataggatttcttgctggaatttcttccatggatacctgggctttctatcacatctggcactttgtttcttctttttgtcacttttagagaaaaagcctcccagaaattagacataatttttgaaaaagagttagagaagtttttaagtttcatgatctcataacccatgtggagagttcttcctagcaccatgagggtgatgatggtggcactartaatagtaattataacagtagatgtaatttattagtaatttcaactgtccagcaatgtgctaagtacttttcatgcaccacctcatctcctcatatcaaccatgtaaggtaggcattgtttatccccattttacaaatgaggaaaatgagactcggggagtttaataatttgccaaaaaacaatcagccaataagagtgaagctgggttcaaacccatgcttgcctggctccagaccctgtcctgtacctgctaacaccgaatgcgctacaacccactgcctggtttctctactgctgta

SEQ ID NO: 2052 - DNA, 601 bp, Human
aaaccggacattgagtacatcttcctgcagagatgcccctggatgtgtggttctggtttacacaatggttacccagatgccacacctgtcagctgctctgagaatccccaagtatttcaagagaatttctcttattcagagtgctggggaaaagacatattcacagagaaatgtgctcacatttcttgcatagcctgttgtccaatattacctaattgtggctacagaaagataaggtataattttatttatttgggatttttttcaaggctaagttgaatctaatcaggtaaataatagrtgtgtttctacaagttgtgctaagtctactctagagctgaggccatatgtttattacataggatttcttgctggaatttcttccatggatacctgggctttctatcacatctggcactttgtttcttctttttgtcacttttagagaaaaagcctcccagaaattagacataatttttgaaaaagagttagagaagtttttaagtttcatgatctcataacccatgtggagagttcttcctagcaccatgagggtgatgatggtggcactaataatagtaattataacagtagatgtaat

SEQ ID NO: 2053 - DNA, 601 bp, Human
tgtaagcatttgctcatttgctatcccagagctatgatcagtttccttcctctgcatgtagcagctctgcatctactttcagggtatcttctcagtcattagtgctatcttgtctatttttttttttttaacatttggggataatttccaaggtcagaaaccggacattgagtacatcttcctgcagagatgcccctggatgtgtggttctggtttacacaatggttacccagatgccacacctgtcagctgctctgagaatccccaagtatttcaagagaatttctcttattcagagtgytggggaaaagacatattcacagagaaatgtgctcacatttcttgcatagcctgttgtccaatattacctaattgtggctacagaaagataaggtataattttatttatttgggatttttttcaaggctaagttgaatctaatcaggtaaataataggtgtgtttctacaagttgtgctaagtctactctagagctgaggccatatgtttattacataggatttcttgctggaatttcttccatggatacctgggctttctatcacatctggcactttgtttcttctttttgtcactttta

SEQ ID NO: 2054 - DNA, 601 bp, Human
tagttcttagtacttgttccccagggaggaaatcccgacagctcacttggtagttcagggatgagggcaagattgttcccttttctgtgcctcagtttcctggcacacgtaagttcagtgtctggctgtaagcatttgctcatttgctatcccagagctatgatcagtttccttcctctgcatgtagcagctctgcatctactttcagggtatcttctcagtcattagtgctatcttgtctatttttttttttttaacatttggggataatttccaaggtcagaaaccggacattgagtayatcttcctgcagagatgcccctggatgtgtggttctggtttacacaatggttacccagatgccacacctgtcagctgctctgagaatccccaagtatttcaagagaatttctcttattcagagtgctggggaaaagacatattcacagagaaatgtgctcacatttcttgcatagcctgttgtccaatattacctaattgtggctacagaaagataaggtataattttatttatttgggatttttttcaaggctaagttgaatctaatcaggtaaataataggtgtgtttctacaagttg

SEQ ID NO: 2055 - DNA, 601 bp, Human
catctcgtgtgctgcataaaaatatcaatgcctgacacagacttcttagttcttagtacttgttccccagggaggaaatcccgacagctcacttggtagttcagggatgagggcaagattgttcccttttctgtgcctcagtttcctggcacacgtaagttcagtgtctggctgtaagcatttgctcatttgctatcccagagctatgatcagtttccttcctctgcatgtagcagctctgcatctactttcagggtatcttctcagtcattagtgctatcttgtctatttttttttttttaacatttggggataatttccaaggtcagaaaccggacattgagtacatcttcctgcagagatgcccctggatgtgtggttctggtttacacaatggttacccagatgccacacctgtcagctgctctgagaatccccaagtatttcaagagaatttctcttattcagagtgctggggaaaagacatattcacagagaaatgtgctcacatttcttgcatagcctgttgtccaatattacctaattgtggctacagaaagataaggtataattttatttatttgggatttttttcaaggct

SEQ ID NO: 2056 - DNA, 601 bp, Human
taaagtacgcctaaaaaacaatcaggtaagattggtcagaaagtatgatctgttatgtatgacaaaatctgggtgaaagtgtaggaataaaaggagaactgtcatctgtagttcttggatatggagagaagggaaaagtgaaggagagatgataacagaaatagttaccatctcgtgtgctgcataaaaatatcaatgcctgacacagacttcttagttcttagtacttgttccccagggaggaaatcccgacagctcacttggtagttcagggatgagggcaagattgttcccttttctrtgcctcagtttcctggcacacgtaagttcagtgtctggctgtaagcatttgctcatttgctatcccagagctatgatcagtttccttcctctgcatgtagcagctctgcatctactttcagggtatcttctcagtcattagtgctatcttgtctatttttttttttttaacatttggggataatttccaaggtcagaaaccggacattgagtacatcttcctgcagagatgcccctggatgtgtggttctggtttacacaatggttacccagatgccacacctgtcagctgctctgagaa

SEQ ID NO: 2057 - DNA, 601 bp, Human
aataaagtacgcctaaaaaacaatcaggtaagattggtcagaaagtatgatctgttatgtatgacaaaatctgggtgaaagtgtaggaataaaaggagaactgtcatctgtagttcttggatatggagagaagggaaaagtgaaggagagatgataacagaaatagttaccatctcgtgtgctgcataaaaatatcaatgcctgacacagacttcttagttcttagtacttgttccccagggaggaaatcccgacagctcacttggtagttcagggatgagggcaagattgttcccttttstgtgcctcagtttcctggcacacgtaagttcagtgtctggctgtaagcatttgctcatttgctatcccagagctatgatcagtttccttcctctgcatgtagcagctctgcatctactttcagggtatcttctcagtcattagtgctatcttgtctatttttttttttttaacatttggggataatttccaaggtcagaaaccggacattgagtacatcttcctgcagagatgcccctggatgtgtggttctggtttacacaatggttacccagatgccacacctgtcagctgctctgag

SEQ ID NO: 2058 - DNA, 601 bp, Human
aactaaggaaaatagctgagctcagattcaaattcaggcttcatgcccaaactcatgttttaaatttctagatgatgctatctgcgaatctgtcactgctttgctggctttatagtgaaaatagtgcacagagccatagtacttgaagttcaaaacaaagacaatcatcagaatagccaagaaaattaatcacacattccatgtcctattttttcagaaagcagagacatgtgtaattcaaattattaatacaaaaataaaattctcgaatgttaataattaggtttgttcagaatagacwtgtttggacatggaaaaaaaacccacacatactatattctgtctgaaaagactttgacaaaatgcaactaataaagtacgcctaaaaaacaatcaggtaagattggtcagaaagtatgatctgttatgtatgacaaaatctgggtgaaagtgtaggaataaaaggagaactgtcatctgtagttcttggatatggagagaagggaaaagtgaaggagagatgataacagaaatagttaccatctcgtgtgctgcataaaaatatcaatgcctgacacagacttcttagttcttagtactt

SEQ ID NO: 2059 - DNA, 601 bp, Human
tccctatgtaaatttcataaagataggatttgtgcctggtacattgtagttgttaaataagtattcgttcatggataaaatatttatagagcactcattatgtgccagacatcatgcaaaatattacacaaacattatcccatttaattctcccaagaacatgatgtgactgtattaccaacctcatcttacagatgaggaaactgaggcttaaggagtttaatttgcaactaaggaaaatagctgagctcagattcaaattcaggcttcatgcccaaactcatgttttaaatttctagaygatgctatctgcgaatctgtcactgctttgctggctttatagtgaaaatagtgcacagagccatagtacttgaagttcaaaacaaagacaatcatcagaatagccaagaaaattaatcacacattccatgtcctattttttcagaaagcagagacatgtgtaattcaaattattaatacaaaaataaaattctcgaatgttaataattaggtttgttcagaatagacttgtttggacatggaaaaaaaacccacacatactatattctgtctgaaaagactttgacaaaatgcaactaat

SEQ ID NO: 2060 - DNA, 601 bp, Human
tatcttagcttaaatcacccttcctcaggggaaagatctttgatccccttccacccatccatatacctcagactccatgctgggttgggggggggggtctctcattaaatgttatcaaagcatcctaaactttttcttcatagctcaagcaattgttcttatttgattatgtgggtgatgatttgttcaacatatctccctatgtaaatttcataaagataggatttgtgcctggtacattgtagttgttaaataagtattcgttcatggataaaatatttatagagcactcattatgtgscagacatcatgcaaaatattacacaaacattatcccatttaattctcccaagaacatgatgtgactgtattaccaacctcatcttacagatgaggaaactgaggcttaaggagtttaatttgcaactaaggaaaatagctgagctcagattcaaattcaggcttcatgcccaaactcatgttttaaatttctagatgatgctatctgcgaatctgtcactgctttgctggctttatagtgaaaatagtgcacagagccatagtacttgaagttcaaaacaaagacaatcatcagaatagc

SEQ ID NO: 2061 - DNA, 601 bp, Human
cttctgctcttctccttgcatggagtgtcctctcaacctctgtcccctccactcaccatttatatcttagcttaaatcacccttcctcaggggaaagatctttgatccccttccacccatccatatacctcagactccatgctgggttgggggggggggtctctcattaaatgttatcaaagcatcctaaactttttcttcatagctcaagcaattgttcttatttgattatgtgggtgatgatttgttcaacatatctccctatgtaaatttcataaagataggatttgtgcctggtacattgtagttgttaaataagtattcgttcatggataaaatatttatagagcactcattatgtgccagacatcatgcaaaatattacacaaacattatcccatttaattctcccaagaacatgatgtgactgtattaccaacctcatcttacagatgaggaaactgaggcttaaggagtttaatttgcaactaaggaaaatagctgagctcagattcaaattcaggcttcatgcccaaactcatgttttaaatttctagatgatgctatctgcgaatctgtcactgctttgctggctttatag

SEQ ID NO: 2062 - DNA, 601 bp, Human
acctgatctcttgatctatggaatacttctctgcaccaggcccttcacttctgctcttctccttgcatggagtgtcctctcaacctctgtcccctccactcaccatttatatcttagcttaaatcacccttcctcaggggaaagatctttgatccccttccacccatccatatacctcagactccatgctgggttgggggggggggtctctcattaaatgttatcaaagcatcctaaactttttcttcatagctcaagcaattgttcttatttgattatgtgggtgatgatttgttcaacwtatctccctatgtaaatttcataaagataggatttgtgcctggtacattgtagttgttaaataagtattcgttcatggataaaatatttatagagcactcattatgtgccagacatcatgcaaaatattacacaaacattatcccatttaattctcccaagaacatgatgtgactgtattaccaacctcatcttacagatgaggaaactgaggcttaaggagtttaatttgcaactaaggaaaatagctgagctcagattcaaattcaggcttcatgcccaaactcatgttttaaatttc

SEQ ID NO: 2063 - DNA, 601 bp, Human
ttttccctaggatgacctttatggaatacaactctaattcggtgacatttccacttaaaggcctcaaacactttccagtactcttagatgaagcccaacgtccatagcatgggccatagggccatatgatctgctcttgccttccgctcctggcctgcctttcactctcttccctatcccctgctctggccaccctgatctcttttttatttttatttttaaatttttttttttgagataaggtctcactctctcacccaggctggagtgtagtggcgcagtcttggctcactgcaacctycgcctcccaggctcaagcaattctcctgcctcagcctcccgagtagctgggattacaggtgcacgctactatagcccagttaatttttgtatttttagtagagacagggtttcaccatgttgaataataagactcattattgcaagagatgtactccattgagtacatctcctgacctcaaatgatccacgtgcctcagcctcagcctcccaaagtgctgggattacacaacctgatctcttgatctatggaatacttctctgcaccaggcccttcacttctgctcttctccttgcatgg

SEQ ID NO: 2064 - DNA, 601 bp, Human
tcaccttcccttttccctaggatgacctttatggaatacaactctaattcggtgacatttccacttaaaggcctcaaacactttccagtactcttagatgaagcccaacgtccatagcatgggccatagggccatatgatctgctcttgccttccgctcctggcctgcctttcactctcttccctatcccctgctctggccaccctgatctcttttttatttttatttttaaatttttttttttgagataaggtctcactctctcacccaggctggagtgtagtggcgcagtcttggctcrctgcaaccttcgcctcccaggctcaagcaattctcctgcctcagcctcccgagtagctgggattacaggtgcacgctactatagcccagttaatttttgtatttttagtagagacagggtttcaccatgttgaataataagactcattattgcaagagatgtactccattgagtacatctcctgacctcaaatgatccacgtgcctcagcctcagcctcccaaagtgctgggattacacaacctgatctcttgatctatggaatacttctctgcaccaggcccttcacttctgctcttct

SEQ ID NO: 2065 - DNA, 601 bp, Human
ccttcttgttgatctcctgcatgcctgggtcaccttcccttttccctaggatgacctttatggaatacaactctaattcggtgacatttccacttaaaggcctcaaacactttccagtactcttagatgaagcccaacgtccatagcatgggccatagggccatatgatctgctcttgccttccgctcctggcctgcctttcactctcttccctatcccctgctctggccaccctgatctcttttttatttttatttttaaatttttttttttgagataaggtctcactctctcacccagrctggagtgtagtggcgcagtcttggctcactgcaaccttcgcctcccaggctcaagcaattctcctgcctcagcctcccgagtagctgggattacaggtgcacgctactatagcccagttaatttttgtatttttagtagagacagggtttcaccatgttgaataataagactcattattgcaagagatgtactccattgagtacatctcctgacctcaaatgatccacgtgcctcagcctcagcctcccaaagtgctgggattacacaacctgatctcttgatctatggaatacttctc

SEQ ID NO: 2066 - DNA, 601 bp, Human
cagccacaacacctgtcacctgtaagtgccttcttgttgatctcctgcatgcctgggtcaccttcccttttccctaggatgacctttatggaatacaactctaattcggtgacatttccacttaaaggcctcaaacactttccagtactcttagatgaagcccaacgtccatagcatgggccatagggccatatgatctgctcttgccttccgctcctggcctgcctttcactctcttccctatcccctgctctggccaccctgatctcttttttatttttatttttaaatttttttttttgagataaggtctcactctctcacccaggctggagtgtagtggcgcagtcttggctcactgcaaccttcgcctcccaggctcaagcaattctcctgcctcagcctcccgagtagctgggattacaggtgcacgctactatagcccagttaatttttgtatttttagtagagacagggtttcaccatgttgaataataagactcattattgcaagagatgtactccattgagtacatctcctgacctcaaatgatccacgtgcctcagcctcagcctcccaaagtgctgggattacacaacc

SEQ ID NO: 2067 - DNA, 601 bp, Human
tccacgtctctccatctccattgtcaggccctactcagccacaacacctgtcacctgtaagtgccttcttgttgatctcctgcatgcctgggtcaccttcccttttccctaggatgacctttatggaatacaactctaattcggtgacatttccacttaaaggcctcaaacactttccagtactcttagatgaagcccaacgtccatagcatgggccatagggccatatgatctgctcttgccttccgctcctggcctgcctttcactctcttccctatcccctgctctggccaccctgayctcttttttatttttatttttaaatttttttttttgagataaggtctcactctctcacccaggctggagtgtagtggcgcagtcttggctcactgcaaccttcgcctcccaggctcaagcaattctcctgcctcagcctcccgagtagctgggattacaggtgcacgctactatagcccagttaatttttgtatttttagtagagacagggtttcaccatgttgaataataagactcattattgcaagagatgtactccattgagtacatctcctgacctcaaatgatccacgtgcctca

SEQ ID NO: 2068 - DNA, 601 bp, Human
gtgttcaaaatgacacatgctagtctgcttgattctggcatttcccatctttataaattatatttggtattcactcactgttaagaaaaagtgacaatcagtcctgatgtcttcttgacgtcttcagtagatcagaactcctagtattgccccagtctttccacgtctctccatctccattgtcaggccctactcagccacaacacctgtcacctgtaagtgccttcttgttgatctcctgcatgcctgggtcaccttcccttttccctaggatgacctttatggaatacaactctaattyggtgacatttccacttaaaggcctcaaacactttccagtactcttagatgaagcccaacgtccatagcatgggccatagggccatatgatctgctcttgccttccgctcctggcctgcctttcactctcttccctatcccctgctctggccaccctgatctcttttttatttttatttttaaatttttttttttgagataaggtctcactctctcacccaggctggagtgtagtggcgcagtcttggctcactgcaaccttcgcctcccaggctcaagcaattctcctgcctcagcctcc

SEQ ID NO: 2069 - DNA, 601 bp, Human
tccagtttagaaatctttcttttaattgacacattgatttttttttcaattgcaagagtagaaatatcctccaattatttgggggctctcagaaaccctactctaaaaaaacatgaatacattcaagctgagtatctgcagctagcattcagccatcaagcgaatggcttcagtccttgcttatttcagctcatgattcatacatgcctcttcatgtaaatgtctcacagaaacctcagggttaatgtgttcaaaatgacacatgctagtctgcttgattctggcatttcccatctttatmaattatatttggtattcactcactgttaagaaaaagtgacaatcagtcctgatgtcttcttgacgtcttcagtagatcagaactcctagtattgccccagtctttccacgtctctccatctccattgtcaggccctactcagccacaacacctgtcacctgtaagtgccttcttgttgatctcctgcatgcctgggtcaccttcccttttccctaggatgacctttatggaatacaactctaattcggtgacatttccacttaaaggcctcaaacactttccagtactcttagatgaagc

SEQ ID NO: 2070 - DNA, 601 bp, Human
taaggcaacaagagctgagctgacgtctggactacaaatacgcaaggatgtcaacattcagaaaagatcaggaacttgctcagggttacacagccagtgagcaaaacgactaggttaaaaactctgttcttcagatttccagtttagaaatctttcttttaattgacacattgatttttttttcaattgcaagagtagaaatatcctccaattatttgggggctctcagaaaccctactctaaaaaaacatgaatacattcaagctgagtatctgcagctagcattcagccatcaagcgartggcttcagtccttgcttatttcagctcatgattcatacatgcctcttcatgtaaatgtctcacagaaacctcagggttaatgtgttcaaaatgacacatgctagtctgcttgattctggcatttcccatctttataaattatatttggtattcactcactgttaagaaaaagtgacaatcagtcctgatgtcttcttgacgtcttcagtagatcagaactcctagtattgccccagtctttccacgtctctccatctccattgtcaggccctactcagccacaacacctgtcacctgta

SEQ ID NO: 2071 - DNA, 601 bp, Human
atgagactagtctatatgtatttcaataactcctaaattttctccatttagcattcattacacacattttgatctaatttgttgttgaagccatttataatcacctcatataaacacttaaggcaacaagagctgagctgacgtctggactacaaatacgcaaggatgtcaacattcagaaaagatcaggaacttgctcagggttacacagccagtgagcaaaacgactaggttaaaaactctgttcttcagatttccagtttagaaatctttcttttaattgacacattgatttttttttcaattgcaagagtagaaatatcctccaattatttgggggctctcagaaaccctactctaaaaaaacatgaatacattcaagctgagtatctgcagctagcattcagccatcaagcgaatggcttcagtccttgcttatttcagctcatgattcatacatgcctcttcatgtaaatgtctcacagaaacctcagggttaatgtgttcaaaatgacacatgctagtctgcttgattctggcatttcccatctttataaattatatttggtattcactcactgttaagaaaaagtgacaatca

SEQ ID NO: 2072 - DNA, 601 bp, Human
gcaaaaattattggtggagagaaagttgattgttttttgaatgttgaatgaatgaatgttgaatgaatgaaaaaattgaatgtcttgcttcccttttaatattgcaataaggtgtacattagaagcattttaaggggcatatatatataagaatatggatatattattggacatgacaacttatttagcatgatttatctgtttctgagaatgagactagtctatatgtatttcaataactcctaaattttctccatttagcattcattacacacattttgatctaatttgttgttgaagycatttataatcacctcatataaacacttaaggcaacaagagctgagctgacgtctggactacaaatacgcaaggatgtcaacattcagaaaagatcaggaacttgctcagggttacacagccagtgagcaaaacgactaggttaaaaactctgttcttcagatttccagtttagaaatctttcttttaattgacacattgatttttttttcaattgcaagagtagaaatatcctccaattatttgggggctctcagaaaccctactctaaaaaaacatgaatacattcaagctgagtatc

SEQ ID NO: 2073 - DNA, 601 bp, Human
ataatgagactcactattgttgtttattcagatttgattttggagagttagaagagtttctatctcaagataggaattggtgttagcaagtgactgccttcagaatgtgttagaacctggggatctggcatgactctattttcctaagtttttcataaggcttatactatctaagaataactaaagaagaaggctgctagggagaccaaccaggaggctagcatattggtttggggtcagagctctaaccgatggctgaaagctataggaagactgatttgggctgccctggaacttggcyttaccatcaatgatacatgaaaagtatctcagaataggcgggatacccactcactgaggccagagactggggagttaagtaccacacagcatcctattaaaatactctttaggggacatttaaatcctgaaattttacaacttattgagaaagcaaaaattattggtggagagaaagttgattgttttttgaatgttgaatgaatgaatgttgaatgaatgaaaaaattgaatgtcttgcttcccttttaatattgcaataaggtgtacattagaagcattttaaggggcatatatatat

SEQ ID NO: 2074 - DNA, 601 bp, Human
tatctgctccaattaggtgattaattcagaacatatcagatcaccaccaataatagtttctggatgtgctgttagagaacaatagtgttggtcagcaatctcagcacagatgtactaattccccaggtgggtgtggaagcagtaaaacttttactcaactgtagttatcaatttctctctctctcactcacagaaaaatgttcatgagaagaaaagaaagctgacacagttcgtcaaaatgaaaataatgagactcactattgttgtttattcagatttgattttggagagttagaagagyttctatctcaagataggaattggtgttagcaagtgactgccttcagaatgtgttagaacctggggatctggcatgactctattttcctaagtttttcataaggcttatactatctaagaataactaaagaagaaggctgctagggagaccaaccaggaggctagcatattggtttggggtcagagctctaaccgatggctgaaagctataggaagactgatttgggctgccctggaacttggccttaccatcaatgatacatgaaaagtatctcagaataggcgggatacccactcactg

SEQ ID NO: 2075 - DNA, 601 bp, Human
atagtcaaacaaagaaacaagtgcatttgaggctgtctcagaaggactaatccctggtacccgttgtgattttctgtgacctcacaccagccatgtttctaagaaaaagtcgtttcccgctgtcgggattcccctctgaaatgctcacccaatatctgctccaattaggtgattaattcagaacatatcagatcaccaccaataatagtttctggatgtgctgttagagaacaatagtgttggtcagcaatctcagcacagatgtactaattccccaggtgggtgtggaagcagtaaaacytttactcaactgtagttatcaatttctctctctctcactcacagaaaaatgttcatgagaagaaaagaaagctgacacagttcgtcaaaatgaaaataatgagactcactattgttgtttattcagatttgattttggagagttagaagagtttctatctcaagataggaattggtgttagcaagtgactgccttcagaatgtgttagaacctggggatctggcatgactctattttcctaagtttttcataaggcttatactatctaagaataactaaagaagaaggctgctagggaga

SEQ ID NO: 2076 - DNA, 601 bp, Human
tacactggggcctgtttggggggtgtggtgaatgagagcatcaagaagaatagctaatggatgctgggctcaatacttaagtgatgggttgatctgtgcagcaaaccaccatggcacaagtttacctatgtaacaaatctgcacatcctgcaacatgtaccccggaacttaaaataaaagttgaagaaaaatagtcaaacaaagaaacaagtgcatttgaggctgtctcagaaggactaatccctggtacccgttgtgattttctgtgacctcacaccagccatgtttctaagaaaaagtygtttcccgctgtcgggattcccctctgaaatgctcacccaatatctgctccaattaggtgattaattcagaacatatcagatcaccaccaataatagtttctggatgtgctgttagagaacaatagtgttggtcagcaatctcagcacagatgtactaattccccaggtgggtgtggaagcagtaaaacttttactcaactgtagttatcaatttctctctctctcactcacagaaaaatgttcatgagaagaaaagaaagctgacacagttcgtcaaaatgaaaataatgagactcact

SEQ ID NO: 2077 - DNA, 601 bp, Human
aggatcaacatgggaagtggtaaaaataccatttgacatagcaatcccattactgggtatatatccaaaggaatataaatcattctatttcaaagatacatgcgtgtgtatgttcattgcagcactattcacaatgtcaaagacatggaatcaacccaaatgcctatcaatgatagactggataaagaaaatgtggtacatatataccattgaatactatgcagccataaaaaggaatgagatcatgtcctttgcagggacatggatggagttggaacctgttatcatcagcaaactaacrcaggaacagaaaaccagacaccacatgttctcacttataagtgggagctgaatgaacacagggacacatggggggaacaacatacactggggcctgtttggggggtgtggtgaatgagagcatcaagaagaatagctaatggatgctgggctcaatacttaagtgatgggttgatctgtgcagcaaaccaccatggcacaagtttacctatgtaacaaatctgcacatcctgcaacatgtaccccggaacttaaaataaaagttgaagaaaaatagtcaaacaaagaaacaagtgcattt

SEQ ID NO: 2078 - DNA, 601 bp, Human
cctggaagacccaagacaggcataaaaatacctgaaggatcaacatgggaagtggtaaaaataccatttgacatagcaatcccattactgggtatatatccaaaggaatataaatcattctatttcaaagatacatgcgtgtgtatgttcattgcagcactattcacaatgtcaaagacatggaatcaacccaaatgcctatcaatgatagactggataaagaaaatgtggtacatatataccattgaatactatgcagccataaaaaggaatgagatcatgtcctttgcagggacatggwtggagttggaacctgttatcatcagcaaactaacacaggaacagaaaaccagacaccacatgttctcacttataagtgggagctgaatgaacacagggacacatggggggaacaacatacactggggcctgtttggggggtgtggtgaatgagagcatcaagaagaatagctaatggatgctgggctcaatacttaagtgatgggttgatctgtgcagcaaaccaccatggcacaagtttacctatgtaacaaatctgcacatcctgcaacatgtaccccggaacttaaaataaaagttg

SEQ ID NO: 2079 - DNA, 601 bp, Human
gtgtccactaaaaaactcttctgaaggccaaagaatattcagaatgaatttccaactgttccagagatagtggtgacaatgattcagaaagttttgtaaaacctggaagacccaagacaggcataaaaatacctgaaggatcaacatgggaagtggtaaaaataccatttgacatagcaatcccattactgggtatatatccaaaggaatataaatcattctatttcaaagatacatgcgtgtgtatgttcattgcagcactattcacaatgtcaaagacatggaatcaacccaaatgccyatcaatgatagactggataaagaaaatgtggtacatatataccattgaatactatgcagccataaaaaggaatgagatcatgtcctttgcagggacatggatggagttggaacctgttatcatcagcaaactaacacaggaacagaaaaccagacaccacatgttctcacttataagtgggagctgaatgaacacagggacacatggggggaacaacatacactggggcctgtttggggggtgtggtgaatgagagcatcaagaagaatagctaatggatgctgggctcaatacttaagt

SEQ ID NO: 2080 - DNA, 601 bp, Human
gggagactgaaaattcacttggctggataagtaggtagtagagcatggtaatccaagtgcccacccagagactctagtcagtgtcatagaagagcagagaattacatcctccaggatgtgatcatttgcgtgactgttaactcagctgagcgatgtggcatcttttgttcactaggatgtaggttagggttatagtggttgagatatcagaatttaattttaagaaataaatatacgtctcctataaggcagtgtgtccactaaaaaactcttctgaaggccaaagaatattcagaatgartttccaactgttccagagatagtggtgacaatgattcagaaagttttgtaaaacctggaagacccaagacaggcataaaaatacctgaaggatcaacatgggaagtggtaaaaataccatttgacatagcaatcccattactgggtatatatccaaaggaatataaatcattctatttcaaagatacatgcgtgtgtatgttcattgcagcactattcacaatgtcaaagacatggaatcaacccaaatgcctatcaatgatagactggataaagaaaatgtggtacatatataccattg

SEQ ID NO: 2081 - DNA, 601 bp, Human
catgaaaccagtcccttgtgccaaaaagattggggaacactgctctatagcccttatcaccattttctgtgctttacttatttctatttttggttgcttttcttgactataaactcccttgaaggaagagcttcctgtctttttaatttactgctgtatcctcaacactcataatggtgtacagcatttagtaggctcccaacaatattgctgaatgaatgacacattcaatcctcctggttttagtctccttaaagatacaccctccttcttatccttcattcgtgtctctctaagtgakcaacatgattctcaatgaatgcttttgagccaatagatgacattggttgatggaagaaaacaacattttgaacacagctcctgcttcaattactcacagctggagatagattctcaaatgcagaaacagagcctgtcttaactcacattccaaggagatctttcagatcttcaagacactcacatttatgtgaaaacaagaccattctccaagtagttttatacagctaagttgcaggcacttcataaaatgattacttccagtacttataaaaacattttatagggtcctggaagaagg

SEQ ID NO: 2082 - DNA, 601 bp, Human
ctgttgctgtctccatcacccccagatgggactgcctagttgcaggaaaacaagctcagggctcccactgattctacattatggtgagttgtataattatttcattatatattacaatgtaataagaatagaaataaagtgcacaataaatgcaatgcgcttgaatcatcctgaaaccatcctcccatctccaggcccatgaaaaatttgtctgccatgaaaccagtcccttgtgccaaaaagattggggaacactgctctatagcccttatcaccattttctgtgctttacttatttctrtttttggttgcttttcttgactataaactcccttgaaggaagagcttcctgtctttttaatttactgctgtatcctcaacactcataatggtgtacagcatttagtaggctcccaacaatattgctgaatgaatgacacattcaatcctcctggttttagtctccttaaagatacaccctccttcttatccttcattcgtgtctctctaagtgatcaacatgattctcaatgaatgcttttgagccaatagatgacattggttgatggaagaaaacaacattttgaacacagctcctgct

SEQ ID NO: 2083 - DNA, 601 bp, Human
tttctttgattgtctcatcctccagagcacagatgatatgctttccaatggtaggagaccaggttatctctctcactgtagtgcaagatgggagcaggaacccaattaacagttcctgccagaagaatatgtatctagttccttctcccttttttttgcctcttacattccaactggtcaccaaaccccacaggtgtctttccttgaaacaccttccaaattttccttctccatcacctccaaccccagcactgctgcatggtgaactggttgtttaaagctgggtgagtcattttttccytcttgggcctcagtttcctcatctgtaaaagtaaagacttagaacagtaattgatgctaccccttcctatctgtaagagcagatgcttctaggcaaatggaaacagtcaaaaggggaaaacagcccatgacaagcaggatgatgaaggaacgtggtggagagatggccagaagggaagagggcaggctttggaaggaagaggggaaactgaggttttggggaaggctttgggaggacaccctcatgtctatcctagaggtttactttgagatcacggaaaggaggggtgggaggagaatt

SEQ ID NO: 2084 - DNA, 601 bp, Human
ggaacatcacacactggggcctgttgtggggtggggggaggggggaaggatagcattaggagatatacctaatgtaaatgacgagttaatgggtgcagcacaccaacatggcacatgtatacatatgtaacaaacctgcatgttctgcacatgtaccctagaacttaaagtataataaaaaaaatatatatatatataaatttttttaattgtctctgcacaaaatctctccctgagaccacccagtctaaagaagagtaatcttcaaactcacacctgctgaatggcttatttatttcayggtacatatcacagtttttaagttttcttatttacttgttttctttgattgtctcatcctccagagcacagatgatatgctttccaatggtaggagaccaggttatctctctcactgtagtgcaagatgggagcaggaacccaattaacagttcctgccagaagaatatgtatctagttccttctcccttttttttgcctcttacattccaactggtcaccaaaccccacaggtgtctttccttgaaacaccttccaaattttccttctccatcacctccaaccccagcactgctgcatg

SEQ ID NO: 2085 - DNA, 601 bp, Human
gcagggccttacattctgagaaatgaagtttgaatgatctcaatttaaaaaaatgtggactccaaagaagaagctaatgttacatgaccatgggagaaaataatctttaattgtttctccttgttcagcgagtggtctctccgatgtgcctggtacacatccaatgagcagaggagagagacaggctgccacaccaacaggccaaggagctccagtgccagtaacattcaggccagacccaatggctccttcttaccaggaagaaaactgccccatcaaattaaaccccagagacaagctrtagagtcaaagtttaagagcagaccagagtctaccagatgcctttgtgctgaactactttggcctgaaccctcctggggtttatgtggggccacttgggcagctctcagtcagcaagaagtttttagattatctaccttagatggtgaccagggctctctaagaaggtggtcagaataaccatggacagtaaccttaggcttgcaacctcaggttcacagacagacttcccatgactgacatgaaatgtgtatgtccagagatacattttcctgggaagagtccttagcttgtattagct

SEQ ID NO: 2086 - DNA, 601 bp, Human
atgtttggtttatcctattaagtgtgtgacagcagccagatgtgtgtaagcctagcacggatttgcatgctcccaaactgatagttccaccaggggcaggttgcaggatccattctcatgcttggagtattcttcccttgtgatggggaacaggtgctgggagccatgtgattttctttgagcagctgctgactggctggggttagatgagagactcatagctatgcttccttcaagaactttccaaagagtgagaaaagacagcaaaagggctaggcatggtggctcacgcctgtaatcmctgcactttgggaggccaaggtgggcagatcacttgacaccaggagtttgagaccagcctgggcaacatggtgaaaccccatctttactaaaaatacaaaaattagctgggtgtggtggcatgtgcctgtagttccagttactcaggaggctgaggtaggaggattgcttgagcccgggaggtagaagttgtagtgagctaatgcgcaccactgcagtccagcatgggcaacgggagtgaacccctgtctaaaaaaaaaaaaaaaggacagcaaaagaactgctcctctccttattgaca

SEQ ID NO: 2087 - DNA, 601 bp, Human
gttttattctttagctctaaagcttttcatgttgtcctataattataataaagtttacagtctttgaatgcctgatttgaaacaggcaaggcactgtgctgaacactttccatatgatttaatcatcgttagtaacatgaagagttatgtgactcttccctattttacaaatgaagaaactgtggcttaatgagtttgagtagctcaaccgaggtcactcacatagttactggtaggtttgaaattaggcagtgtgattgatttcagggcccatgctcctttgtggaatctccaaatataytgcaataatacatctcttaggaggatagctgatggggagtgataaagtgtgcagctgggggaagctgaattggaaaaatgctttttcgaacctcatctgtgatggaaaaaatggctaatgccaacatgactgatggttttgtgcaaatgcggtcagttccagaaaaaaatttgtcttacattatgaaacctatatattgtccaatatttcctactaatagtgacagtgatgtgattaaggaaacccatttcacaaagacctgcctgggcctgtgcttaatgactacaagaatgtctgagc

SEQ ID NO: 2088 - DNA, 601 bp, Human
ggcctcaggacccgtcacatcctgcgcagagactgccacagggcatttcgcagcagaagaacaaaactgtgaagtcttaaaatggaacaaccttaaggattatctcctccaattactcaatttacaaatttaaaaaatgcttatttagccttttcccagctgccgccaagatgctctgcccttctgagctgaggctgcgttggggtcaggccctcactgcatccagcactagcactactccgggcagcccagccttgcacttgtccacaccacggactccatctcagagctcgcctgcacygactcagccctcattctgtataacgctgaggggatcatcacataggataaggtcaatgtcgtttctaaagcagctggggtaaatgatgacggcttttggcctggcttgtctgccaaggccctggccatcgtcaacttcgggagcctcctctgcagtggaggggcggggtgggaagacctgctcagcagctggtggtgtacctgcgggaggtcctgcccttctgtcactgtggcctaggccgagaagaagaaggtggaagcaaagaaagaagaatctggagtctgatgataatatgggctt

SEQ ID NO: 2089 - DNA, 601 bp, Human
atgtgaaactcagactgagtccacatatgtaaattgttttgcctaattgaaaattgcctaaattgaaaagtaagttggaatccatgcaagtaatccatattaaaattcggttatctgaacatgccttttattctctgatgcagtgttatgcaacagacacagcctcagtgtttatgaattcctcccctcccaaatgttagaattatggattttgatgagaatctcaactttacacaatattggccttgccaaagttgggccagtgattctcaatcacttttcctagatgatgtcttttgaygtcaccgttagctccctttgtcaatatccctcgatgtctcccaaatgtgtgtctttgcttcacattcggagtcctccacagcctctggtctaaccagctttctaatatgactagttgctattttttctctagccagactcactacactttttctccaggtcattgatcattttttttgtcctctcaagttgggccactgtgtccttgatgcccttttccaccttctctacctacccaaaccctacccgttgatgtgcacggcaggaaccaggcctcaggacccgtcacatcctgcgcaga

SEQ ID NO: 2090 - DNA, 601 bp, Human
atgagtttctcacatttgactgactagctcctatgactgtcacccttttgcaatatcttcaaagaccattcctacttggtccgcgtgtgtcattaattacaggagcaggcccagtgggtagggttgcactggctctcagtgaccaacagctgctgtgaagttttaccaaatgaaaatgtgaaactcagactgagtccacatatgtaaattgttttgcctaattgaaaattgcctaaattgaaaagtaagttggaatccatgcaagtaatccatattaaaattcggttatctgaacatgccytttattctctgatgcagtgttatgcaacagacacagcctcagtgtttatgaattcctcccctcccaaatgttagaattatggattttgatgagaatctcaactttacacaatattggccttgccaaagttgggccagtgattctcaatcacttttcctagatgatgtcttttgacgtcaccgttagctccctttgtcaatatccctcgatgtctcccaaatgtgtgtctttgcttcacattcggagtcctccacagcctctggtctaaccagctttctaatatgactagttgctattttt

SEQ ID NO: 2091 - DNA, 601 bp, Human
tgctttctgcagagacactggattctcaagacattctgaaaggcctttttgaactcttggctggagcatgggtatatgatggggttgatgcagctgtttagatatccgagccaaaatactattttaaaaactgtttcagagggcttgaaatcagggaagaaagaccctggaagaaaacacacagatttatacatattatttgaaagccagcaagccaattggctaggaaaacaatcaaacagacatctttctgtatttttaaacggttaaaatgatcccaaacacatatgagtttctcacrtttgactgactagctcctatgactgtcacccttttgcaatatcttcaaagaccattcctacttggtccgcgtgtgtcattaattacaggagcaggcccagtgggtagggttgcactggctctcagtgaccaacagctgctgtgaagttttaccaaatgaaaatgtgaaactcagactgagtccacatatgtaaattgttttgcctaattgaaaattgcctaaattgaaaagtaagttggaatccatgcaagtaatccatattaaaattcggttatctgaacatgccttttattctctgat

SEQ ID NO: 2092 - DNA, 601 bp, Human; identical to SEQ ID NO: 225

SEQ ID NO: 2093 - DNA, 601 bp, Human
ctcctgcccccttctgcccatgctgggtgggagcgccaggagcagggggtggctgggggcggccaggggcagcaatgggcggttggctcaccctgcaggtcctctgcctcccggcgggtcttgggtgtgtagaagaagcctcgttccccgcacactaggtagagagcttccaccaggtgtgagccgcacaggtgttggttcacaaaggctgcggctgggtcaggtccccagagggccagcagcgccagcaggggcaggaggcgcatccacagggccatggcagaaggacagtgatctgggwgacaggcagggctgaggcaggctgaaggccaggtgccctgccttggggcccctgggctcacccccacatgcttcacgagcccagccacgtcctccctgctgcagagctggggcctggggtccagccaccctggaaccctgagcccacctgacgcaaaggcccttggaacagacctgcttgatggcctcttctgatgcagcctgtcctggagggctgagggctgctgggcccccgctggctttatagtctcagagcccatctcccctacctgtcaacccctgccgcctggcccattagggc

SEQ ID NO: 2094 - DNA, 601 bp, Human; identical to SEQ ID NO: 184

SEQ ID NO: 2095 - DNA, 601 bp, Human; identical to SEQ ID NO: 185

SEQ ID NO: 2096 - DNA, 601 bp, Human; identical to SEQ ID NO: 409

SEQ ID NO: 2097 - DNA, 601 bp, Human; identical to SEQ ID NO: 410

SEQ ID NO: 2098 - DNA, 601 bp, Human; identical to SEQ ID NO: 411

SEQ ID NO: 2099 - DNA, 601 bp, Human; identical to SEQ ID NO: 412

SEQ ID NO: 2100 - DNA, 601 bp, Human; identical to SEQ ID NO: 413

SEQ ID NO: 2101 - DNA, 601 bp, Human; identical to SEQ ID NO: 414

SEQ ID NO: 2102 - DNA, 601 bp, Human; identical to SEQ ID NO: 415

SEQ ID NO: 2103 - DNA, 601 bp, Human; identical to SEQ ID NO: 416

SEQ ID NO: 2104 - DNA, 601 bp, Human; identical to SEQ ID NO: 417

SEQ ID NO: 2105 - DNA, 601 bp, Human; identical to SEQ ID NO: 418

SEQ ID NO: 2106 - DNA, 601 bp, Human; identical to SEQ ID NO: 419

SEQ ID NO: 2107 - DNA, 601 bp, Human; identical to SEQ ID NO: 420

SEQ ID NO: 2108 - DNA, 601 bp, Human; identical to SEQ ID NO: 513

SEQ ID NO: 2109 - DNA, 601 bp, Human; identical to SEQ ID NO: 514

SEQ ID NO: 2110 - DNA, 601 bp, Human; identical to SEQ ID NO: 515

SEQ ID NO: 2111 - DNA, 601 bp, Human; identical to SEQ ID NO: 516

SEQ ID NO: 2112 - DNA, 601 bp, Human; identical to SEQ ID NO: 517

SEQ ID NO: 2113 - DNA, 601 bp, Human; identical to SEQ ID NO: 518

SEQ ID NO: 2114 - DNA, 601 bp, Human
aaacctttgcggtgaggctttgtgcagtctgtcctctcagtctggagtatttctccatccttagtgaccaaagtttgtttctcaagccattaaaaccttttttactaaagcaacgtttaggcagtgtgctccactaaaaacacacttttgtacatttgttgtacttgtgtgtgtccgtgttttggagtactgttaaacatacgtgttaagcatacatgttaaatgcctgtgaatctgtgcacgttgagccttaagcacacatacagcataacaaggtggttgaaaggatgggctttgtagyggagaaacttgagtttgaatgctggacctgcgacttaataaccacatatatgattattattcatcctttcataacatcagtttcttcatctgtaaagtgggaataataagacctacttcctgtgctttttctagggattacttaaatgaaatattcagaatgcttagcccagtgcctagatcatagcagaaaatcaataaatggtagccgccattgttgtagtcatcacagtgtgtcttcaaactttgaaaacttttaagttgagaaaccatttttgaaatgagatctcaggtaatatat

SEQ ID NO: 2115 - DNA, 601 bp, Human
cttttaagttgagaaaccatttttgaaatgagatctcaggtaatatataaaacaaagtagcatgctctgcttacagagtaagtggggttccaactccacttacacctgttctgcttccccttccccaacccctctctgcttactctctccctgtgttccctcatccttcacaacaggaaaaaaacctgaacaccacagctttaacatacatatatgcagaatttccaaagtttacagcatgacaaagatggacagcagagtttttcatcatttgactatgaccttgtggtaatttttttttcttttacatactgctaagccttccaaaaagattttctgtttcttggttttatgttttcttttagaattgaagttcttcaagatcagggaccacatctctaaattctccaaataatgtctcagaatcttgtataataaaggctgccatttttagggaagctgggaaatgttgtatacatttgcattttgaattaaaggtgtcctcatttccagtgaatcacttattttgaattgataaggttaactaatacatgctgcgtatttgaataacctgttaggaacaatggagaaaaattgaccc

SEQ ID NO: 2116 - DNA, 601 bp, Human
cagcttgatgtgaatctgtgttgttaaccaccacagcacactgcctttcagcaaaggctgattaaagctgcaccaagtctctaagtgtgtacagcccatcagaatctcgacactgtgtttgacaagcatgggacgtgcagttaaactggggaagaaatttctttctcatagaagagatccttgtgtgtgaaaattagaactatctgaataaattagaatcaacagaaattctttatgtgagtgaaatagccttcgagaaaagcaggacagttatttcctttaacgcctctccttgggtacrgcagggataggtgaattcctgcatcactgcttaacaagtatttactgagcaccagtggattggtgttataataacttggcctcaggttaatttccctccttgaaaatgttctattaaaaagagtttgaccacacagtgggctcacacagcaggggatttatgtggatcccccagtgtatggaaggacagaaaataattaaaaatcagaatgtactctaattcaaaaccaaaaggcgtccccatctatgtccttgtgaaaattgtgcaagttggcaaattaatgaggctgttgcctggggt

SEQ ID NO: 2117 - DNA, 601 bp, Human
ttaatctaagaataatttatatcattataagcagtcttgtcactgagggatgttcaaaaactgactcattgctcttcagagattaaagttttataattttttaagagtataaaaattataaattataaaaattataaaagcataggttctacatgttttatgtgttcatcctaggaatcatgttattgttgttaccattgattttagcatctgtttttgcattttactttccaacttgtggatcctatttacagcattctatttattaatttttataaaaacctagtttattaaaaactasttacagtaatatttgattttttaaagacaattaggtcatttgtaaataataagttttccttcacttttctgattttattttatttatttatttatttatttatttagagacagagtctcactctgttgcctactttggagtgcagtggagtgatctcagctcactgcaacctctacctcccaggttcaagcaattctcttgcctcagcctcctgagtaactgggattacagacacatgccaccacacccagctaatttttttgtatttttagtagagacggggtttcatcatgttggcca

SEQ ID NO: 2118 - DNA, 601 bp, Human
gtatcacctgctccaaagctttttgggggaccatgagccatagcattttttaaagccctctctctcactcagtgttcagaatttgtattaaaatttcaaagttcatttaacaattttgattatcagagtgaaaagctaatgcatctgttttcttagacttgaacagagtataaaataaagatgaaaactaaatctcaaacacatttccatcagtgctttggatttcattagttcttggcaaacattatttacacttacataaagtttattgattccagtatgatgttcaaaagctgactcrttgctcttcagaaattacagaaatgtctaccctcaatctcttgggaaagaaactgaattaaaaaggtagagtaagaaataagctgaaacttgtctgtatcaattagttttccttgagcactccctggatatatgcaactacacggaagtatttaagagattataaaaacagtttctcatcaagtttttcatctgaggcagggaccttgatggtttcttctcatggacaggtaactctatgtacatttcagtacatccctgtaatcttcagcctacttgttagttaccataacaacagtaa

SEQ ID NO: 2119 - DNA, 601 bp, Human; identical to SEQ ID NO: 519

SEQ ID NO: 2120 - DNA, 601 bp, Human; identical to SEQ ID NO: 520

SEQ ID NO: 2121 - DNA, 601 bp, Human; identical to SEQ ID NO: 521

SEQ ID NO: 2122 - DNA, 601 bp, Human; identical to SEQ ID NO: 522

SEQ ID NO: 2123 - DNA, 601 bp, Human; identical to SEQ ID NO: 531

SEQ ID NO: 2124 - DNA, 601 bp, Human; identical to SEQ ID NO: 532

SEQ ID NO: 2125 - DNA, 601 bp, Human; identical to SEQ ID NO: 533

SEQ ID NO: 2126 - DNA, 601 bp, Human; identical to SEQ ID NO: 534

SEQ ID NO: 2127 - DNA, 601 bp, Human; identical to SEQ ID NO: 535

SEQ ID NO: 2128 - DNA, 601 bp, Human; identical to SEQ ID NO: 536

SEQ ID NO: 2129 - DNA, 601 bp, Human; identical to SEQ ID NO: 537

SEQ ID NO: 2130 - DNA, 601 bp, Human; identical to SEQ ID NO: 538

SEQ ID NO: 2131 - DNA, 601 bp, Human; identical to SEQ ID NO: 539

SEQ ID NO: 2132 - DNA, 601 bp, Human; identical to SEQ ID NO: 540

SEQ ID NO: 2133 - DNA, 601 bp, Human; identical to SEQ ID NO: 541

SEQ ID NO: 2134 - DNA, 601 bp, Human; identical to SEQ ID NO: 1496

SEQ ID NO: 2135 - DNA, 601 bp, Human
tttatttttgccccctgtaaagtgccacaaaggcagggacacacgtatttcagtctccactgcctggctcacagagaaaaactcaatgaatagttatttaagggaatataagtgtttgtgtttttccaaaaaaagtagtatgaaggaaatcactgatatttcacccaaaggtagaagtgttcactataaacatctaagaataattttattctaaatgttcaacatgcagttgataaacatttactaatgacaacaaaataactgcatttagtatactatggtatcacagtaagtcaaaaaatacagattttctaatagtatctctattttatccccttgatgctgggtgtggctatgtgacttgctttaggcaatgggatagtagcaaatgtgatataagcagaggcttgaaaagtatttatgcactcattgcttccctgctcttgctgctgggaacctgttcaataccacgtgaggactgggtcagtctgctggggacacgtggaccagtcaatagcaagcaccaactgacagccagcatcatccactagatatgtgaggaagagcatcctagacaactagcccccagtcaatcctccaa

SEQ ID NO: 2136 - DNA, 601 bp, Human
gcttagtaaaccaccctgaactctcctctgtacctgctgaccttaaaattcatgtgaaactaggttctggctgttactaaaccaatctaaatgccatcaaaagttctccaaaatcttgtagtggcgctatctcggctcgctgcaacccccacctcctgggctcaagcaattctcctgcctcagcctccggagtagctgggactataggcgccccccaccacgcccggctaatttttgtatttttagtagaaacagggtttcaccatgttggtcaggctggtctcgaactcctgacctcacratctgcctgcctcggcctcccaaagtgctgggattacaggcgtgagccaccgcacccagcgaatccttctttaaagtaaccagagctcactgaggcaagacagatggtgccttcagtgacccattctctaacaacaatgttgtaacacttgtctgcaaaataggaactcatgttcaatatgttttatgtaactatattcaatatattgcaatattgtttatgcaactgaagagaccatcagaacctagaaactagtaataggattctcccaactcaatactcccactatcaccgaatcac

SEQ ID NO: 2137 - DNA, 601 bp, Human
tcacgcctgtaagcccagaactctgggaggcccaggtgggtggatcacaaggtcaagatatagagaccatcctggccaacatgatgaaaccccgtctctactaaaaatacaaaaattagctgggcacgatggcgtgcgcctgtggtcccagctactcgggaggctgagacaggagaatcacgtgaacccaggaggtggaggttgcagtgagctgaaatcacgccactgcactccagcctggtgacagagtgagactccgtctaataaataaataaataaataaataaataaataaataaaaaaaatacaatggctgctttccctaacaggctgtatgtagccaaagagaggcctaactgcttatgtgcttgcttccaatgacaaagtgcgtgtgtaagaagcacagatatacttgactgtttataaactactgcaattaataatttatgacaacgactgcaagtcatacaacatctgagggtacctataatacactaagcaagaagctttcactactagaggatggtacggtttgaactctcctggagccctggttctgggcattcagtaggccagcagttcccaaacatgttctacagaa

SEQ ID NO: 2138 - DNA, 601 bp, Human
ttgcaaagctcagggagataatgagataaggctgcagtgaacaaggagacacattacttacgtgacccattcatcacgctcattgccctcaaatctctgagagtccaaaaaaaaaaaaaaatcctcaagggccaggcatggtggctcacacctgtaataccagcactttgagaggccaaggagggcagatcacatgaggcctcaggagttcaagaccagcttggccaaatgatgaaaccccatatctactaaaaatacaaaaatttgtcaggcatggtggtgcacatctgtaatcccagcwactcaggaggctgaggcacaagaatcacttgaacccaggaggtggaggttgcagcaagctgagatctagccactgaactccagcctgggaaacagagcgagactctgtctcaaaaaaaaaaaaaaaaaaaaaaccaaaccaaaatgttaaatattagattccttctgttccagaattagtagactttaaaaaataaattcactttaaaaaataaatccactaaatttattctctaagaggctattcctaaatcagaacactgtttcatagaggttttccctactttataagataaatatc

SEQ ID NO: 2139 - DNA, 601 bp, Human
aatgtctgcaggtatttctgcttgtcacaaccaggaaaggggttggggaggagagatgctactggcttctaatgggtaagggcctggaatactactagacaccttacaacacagtggagagtctactgcaacaaattaacagtttaataaaatggagaaaatacctggtttcacaatcatttgcaaagctcagggagataatgagataaggctgcagtgaacaaggagacacattacttacgtgacccattcatcacgctcattgccctcaaatctctgagagtccaaaaaaaaaaaaaaatcctcaagggccaggcatggtggctcacacctgtaataccagcactttgagaggccaaggagggcagatcacatgaggcctcaggagttcaagaccagcttggccaaatgatgaaaccccatatctactaaaaatacaaaaatttgtcaggcatggtggtgcacatctgtaatcccagcaactcaggaggctgaggcacaagaatcacttgaacccaggaggtggaggttgcagcaagctgagatctagccactgaactccagcctgggaaacagagcgagactctgtctcaaaaaaaaa

SEQ ID NO: 2140 - DNA, 601 bp, Human
tttgcagacaccctccagtctccaagcatttcactaaatctctagggtaatggttctcaatttgtgtgggtgaaaaaactttgccccacagggaacatctggcaatgtctgcaggtatttctgcttgtcacaaccaggaaaggggttggggaggagagatgctactggcttctaatgggtaagggcctggaatactactagacaccttacaacacagtggagagtctactgcaacaaattaacagtttaataaaatggagaaaatacctggtttcacaatcatttgcaaagctcagggagataatgagataaggctgcagtgaacaaggagacacattacttacgtgacccattcatcacgctcattgccctcaaatctctgagagtccaaaaaaaaaaaaaaatcctcaagggccaggcatggtggctcacacctgtaataccagcactttgagaggccaaggagggcagatcacatgaggcctcaggagttcaagaccagcttggccaaatgatgaaaccccatatctactaaaaatacaaaaatttgtcaggcatggtggtgcacatctgtaatcccagcaactcaggaggctgaggc

SEQ ID NO: 2141 - DNA, 601 bp, Human
cctgcctcagcctcccaagtagctgggactacaggcacgcaccaccatgcctggctaatttttgtacttttagtagagacggggtttcaccatgttgggtaggttggtctcgaactcctgacctcaggtgatccacctgcctctgcctcccaaagtgctgggattgcaggtgtgagccatcatgcccagccctaacagcattcttaaacgaaactgcatatcacattattgcagggttgagctgcttgtctggctgagctaaaagcaccccatggacagttgtgccccattcttaataaayaggtagtgacaacttttagctaaggaaccgccattaagaagtatttatagtgactgttatggactgaaacatgtctttccttgcaatttatatgttgagatcctaaccctcaacatgatggtattaggaggtggtgcctttggtaggtaattaagtcatgagggtggagccctcatgggtgggataagtgcccttatgatgaaacatgagagcttgctttctgctctctaccacaggaggctacaataagaagacggccatcgtaaaccaggaagagggcacaccaaaccagggtctgtg

SEQ ID NO: 2142 - DNA, 601 bp, Human
cagccaggaagctttaattttaacagagctcaaccaaaataaacctgttacgaaaagacatgaaggtaatatgacagaatattccctactaagtgagaatgtcatacgaatgtctttcttctgctttcatgggcactatttctgcagcatcctttccctcacagaaattacatttcagttctgaggtttctattgtaatttcacatcacttttgggtttggggttttgtttgtaatggtcagattacaggatacaggttttataggtctggctttgatacaaaccagtagacttgcattamaatcaaaacttcatttagtgtatggatggtgaaaattgtgtgcaaaactgtttctataattagacaaaagggaatcaggcagagcctattttcactgcctttgctttttttgttaaaaactaatagatttctcattctttgccctctccctggagtcaaattgcttcaagaaagcaagcgtctgattttacatttgagtaactgtctgactacccaattgtttctcaagcatcatcagtttttccataatagcccaggaatcaggcaccaaacaagcatttgcatagacaaccctggtct

SEQ ID NO: 2143 - DNA, 601 bp, Human; identical to SEQ ID NO: 371

SEQ ID NO: 2144 - DNA, 601 bp, Human; identical to SEQ ID NO: 372

SEQ ID NO: 2145 - DNA, 601 bp, Human; identical to SEQ ID NO: 373

SEQ ID NO: 2146 - DNA, 601 bp, Human; identical to SEQ ID NO: 374

SEQ ID NO: 2147 - DNA, 601 bp, Human; identical to SEQ ID NO: 375

SEQ ID NO: 2148 - DNA, 601 bp, Human; identical to SEQ ID NO: 376

SEQ ID NO: 2149 - DNA, 601 bp, Human; identical to SEQ ID NO: 377

SEQ ID NO: 2150 - DNA, 601 bp, Human; identical to SEQ ID NO: 378

SEQ ID NO: 2151 - DNA, 601 bp, Human; identical to SEQ ID NO: 379

SEQ ID NO: 2152 - DNA, 601 bp, Human; identical to SEQ ID NO: 380

SEQ ID NO: 2153 - DNA, 601 bp, Human; identical to SEQ ID NO: 381

SEQ ID NO: 2154 - DNA, 601 bp, Human; identical to SEQ ID NO: 382

SEQ ID NO: 2155 - DNA, 601 bp, Human; identical to SEQ ID NO: 383

SEQ ID NO: 2156 - DNA, 601 bp, Human; identical to SEQ ID NO: 384

SEQ ID NO: 2157 - DNA, 601 bp, Human; identical to SEQ ID NO: 385

SEQ ID NO: 2158 - DNA, 601 bp, Human; identical to SEQ ID NO: 386

SEQ ID NO: 2159 - DNA, 601 bp, Human; identical to SEQ ID NO: 387

SEQ ID NO: 2160 - DNA, 601 bp, Human; identical to SEQ ID NO: 388

SEQ ID NO: 2161 - DNA, 601 bp, Human; identical to SEQ ID NO: 389

SEQ ID NO: 2162 - DNA, 601 bp, Human; identical to SEQ ID NO: 390

SEQ ID NO: 2163 - DNA, 601 bp, Human; identical to SEQ ID NO: 391

SEQ ID NO: 2164 - DNA, 601 bp, Human; identical to SEQ ID NO: 392

SEQ ID NO: 2165 - DNA, 601 bp, Human; identical to SEQ ID NO: 393

SEQ ID NO: 2166 - DNA, 601 bp, Human; identical to SEQ ID NO: 394

SEQ ID NO: 2167 - DNA, 601 bp, Human; identical to SEQ ID NO: 395

SEQ ID NO: 2168 - DNA, 601 bp, Human; identical to SEQ ID NO: 396

SEQ ID NO: 2169 - DNA, 601 bp, Human; identical to SEQ ID NO: 397

SEQ ID NO: 2170 - DNA, 601 bp, Human; identical to SEQ ID NO: 398

SEQ ID NO: 2171 - DNA, 601 bp, Human; identical to SEQ ID NO: 399

SEQ ID NO: 2172 - DNA, 601 bp, Human; identical to SEQ ID NO: 400
